United States Patent Application Publication US 2025/0290144 A1 - sequence listing, part 3

SEQ ID NO: 55852 - DNA, 23 bp, Homo sapiens
  source 1..23: mol_type = genomic DNA
agacgggctcacatcaccccata

SEQ ID NO: 55853 - DNA, 29 bp, Homo sapiens
  source 1..29: mol_type = genomic DNA
cgccgtgatcgtatagtggttagtactct

SEQ ID NO: 55854 - DNA, 18 bp, Homo sapiens
  source 1..18: mol_type = genomic DNA
atggaggccatggggttg

SEQ ID NO: 55855 - DNA, 20 bp, Homo sapiens
  source 1..20: mol_type = genomic DNA
gtctaggggtatgattctcg

SEQ ID NO: 55856 - DNA, 25 bp, Homo sapiens
  source 1..25: mol_type = genomic DNA
cagtcggtagagcatgagactctta

SEQ ID NO: 55857 - DNA, 18 bp, Homo sapiens
  source 1..18: mol_type = genomic DNA
cccaacttacacttagga

SEQ ID NO: 55858 - DNA, 21 bp, Homo sapiens
  source 1..21: mol_type = genomic DNA
agtggtagaattctcgcctcc

SEQ ID NO: 55859 - DNA, 19 bp, Homo sapiens
  source 1..19: mol_type = genomic DNA
gtctaacaacatggctttc

SEQ ID NO: 55860 - DNA, 16 bp, Homo sapiens
  source 1..16: mol_type = genomic DNA
gacaggggttaggcct

SEQ ID NO: 55861 - DNA, 43 bp, Homo sapiens; identical to SEQ ID NO: 30593
  source 1..43: mol_type = genomic DNA

SEQ ID NO: 55862 - DNA, 36 bp, Homo sapiens; identical to SEQ ID NO: 14223
  source 1..36: mol_type = genomic DNA

SEQ ID NO: 55863 - DNA, 34 bp, Homo sapiens; identical to SEQ ID NO: 7600
  source 1..34: mol_type = genomic DNA

SEQ ID NO: 55864 - DNA, 18 bp, Homo sapiens
  source 1..18: mol_type = genomic DNA
gcggttatcacgtctgct

SEQ ID NO: 55865 - DNA, 30 bp, Homo sapiens; identical to SEQ ID NO: 7329
  source 1..30: mol_type = genomic DNA

SEQ ID NO: 55866 - DNA, 40 bp, Homo sapiens; identical to SEQ ID NO: 1078
  source 1..40: mol_type = genomic DNA

SEQ ID NO: 55867 - DNA, 19 bp, Homo sapiens
  source 1..19: mol_type = genomic DNA
aagtcccattggtctagcc

SEQ ID NO: 55868 - DNA, 33 bp, Homo sapiens; identical to SEQ ID NO: 16770
  source 1..33: mol_type = genomic DNA

SEQ ID NO: 55869 - DNA, 46 bp, Homo sapiens; identical to SEQ ID NO: 21734
  source 1..46: mol_type = genomic DNA

SEQ ID NO: 55870 - DNA, 20 bp, Homo sapiens
  source 1..20: mol_type = genomic DNA
ggttcgagtcccggcggagt

SEQ ID NO: 55871 - DNA, 16 bp, Homo sapiens
  source 1..16: mol_type = genomic DNA
attcggcgctctcacc

SEQ ID NO: 55872 - DNA, 22 bp, Homo sapiens
  source 1..22: mol_type = genomic DNA
gactcaagttctggtctccgga

SEQ ID NO: 55873 - DNA, 22 bp, Homo sapiens
  source 1..22: mol_type = genomic DNA
tcaattcccggccaatgcacca

SEQ ID NO: 55874 - DNA, 30 bp, Homo sapiens; identical to SEQ ID NO: 1852
  source 1..30: mol_type = genomic DNA

SEQ ID NO: 55875 - DNA, 24 bp, Homo sapiens
  source 1..24: mol_type = genomic DNA
tacctcctcaaagcaatacactga

SEQ ID NO: 55876 - DNA, 16 bp, Homo sapiens
  source 1..16: mol_type = genomic DNA
tgtccgcgtgggttcg

SEQ ID NO: 55877 - DNA, 38 bp, Homo sapiens; identical to SEQ ID NO: 1011
  source 1..38: mol_type = genomic DNA

SEQ ID NO: 55878 - DNA, 22 bp, Homo sapiens
  source 1..22: mol_type = genomic DNA
gttcgaatccgagtcacggcac

SEQ ID NO: 55879 - DNA, 22 bp, Homo sapiens
  source 1..22: mol_type = genomic DNA
cggcccgggttcgattcccggt

SEQ ID NO: 55880 - DNA, 23 bp, Homo sapiens
  source 1..23: mol_type = genomic DNA
gttcgagtcccatctgggtcgcc

SEQ ID NO: 55881 - DNA, 25 bp, Homo sapiens
  source 1..25: mol_type = genomic DNA
tcggtagagcatgggactcttaatc

SEQ ID NO: 55882 - DNA, 32 bp, Homo sapiens; identical to SEQ ID NO: 3157
  source 1..32: mol_type = genomic DNA

SEQ ID NO: 55883 - DNA, 18 bp, Homo sapiens
  source 1..18: mol_type = genomic DNA
aatagtaccgttaacttc

SEQ ID NO: 55884 - DNA, 31 bp, Homo sapiens; identical to SEQ ID NO: 12010
  source 1..31: mol_type = genomic DNA

SEQ ID NO: 55885 - DNA, 18 bp, Homo sapiens
  source 1..18: mol_type = genomic DNA
gcaatggtggttcagtgg

SEQ ID NO: 55886 - DNA, 22 bp, Homo sapiens
  source 1..22: mol_type = genomic DNA
ttcgattcccggccaacgcacc

SEQ ID NO: 55887 - DNA, 29 bp, Homo sapiens
  source 1..29: mol_type = genomic DNA
gccgcggcccgggttcgattcccggtcag

SEQ ID NO: 55888 - DNA, 21 bp, Homo sapiens
  source 1..21: mol_type = genomic DNA
cagttgatgcagagtggggtt

SEQ ID NO: 55889 - DNA, 30 bp, Homo sapiens; identical to SEQ ID NO: 3403
  source 1..30: mol_type = genomic DNA

SEQ ID NO: 55890 - DNA, 25 bp, Homo sapiens
  source 1..25: mol_type = genomic DNA
aaagtcatggaggccatggggttgg

SEQ ID NO: 55891 - DNA, 26 bp, Homo sapiens
  source 1..26: mol_type = genomic DNA
tccattggggtttccccgcgcaggtt

SEQ ID NO: 55892 - DNA, 24 bp, Homo sapiens
  source 1..24: mol_type = genomic DNA
gctaatggtggagttaaagacttt

SEQ ID NO: 55893 - DNA, 28 bp, Homo sapiens
  source 1..28: mol_type = genomic DNA
aatggtggttcagtggtagaattctcgc

SEQ ID NO: 55894 - DNA, 35 bp, Homo sapiens; identical to SEQ ID NO: 23713
  source 1..35: mol_type = genomic DNA

SEQ ID NO: 55895 - DNA, 35 bp, Homo sapiens; identical to SEQ ID NO: 22225
  source 1..35: mol_type = genomic DNA

SEQ ID NO: 55896 - DNA, 27 bp, Homo sapiens
  source 1..27: mol_type = genomic DNA
aagaagcagcttcaaacctgccggggc

SEQ ID NO: 55897 - DNA, 22 bp, Homo sapiens
  source 1..22: mol_type = genomic DNA
atgtctaacaacatggctttct

SEQ ID NO: 55898 - DNA, 16 bp, Homo sapiens
  source 1..16: mol_type = genomic DNA
aaacatcagattgtga

SEQ ID NO: 55899 - DNA, 18 bp, Homo sapiens
  source 1..18: mol_type = genomic DNA
atcagattgtgaatctga

SEQ ID NO: 55900 - DNA, 19 bp, Homo sapiens
  source 1..19: mol_type = genomic DNA
aacacaaagcacccaactt

SEQ ID NO: 55901 - DNA, 17 bp, Homo sapiens
  source 1..17: mol_type = genomic DNA
tcaccgccgcggcccgg

SEQ ID NO: 55902 - DNA, 17 bp, Homo sapiens
  source 1..17: mol_type = genomic DNA
cttacctcctcaaagca

SEQ ID NO: 55903 - DNA, 47 bp, Homo sapiens; identical to SEQ ID NO: 8800
  source 1..47: mol_type = genomic DNA

SEQ ID NO: 55904 - DNA, 34 bp, Homo sapiens; identical to SEQ ID NO: 15105
  source 1..34: mol_type = genomic DNA

SEQ ID NO: 55905 - DNA, 40 bp, Homo sapiens; identical to SEQ ID NO: 16647
  source 1..40: mol_type = genomic DNA

SEQ ID NO: 55906 - DNA, 26 bp, Homo sapiens
  source 1..26: mol_type = genomic DNA
gtggttaggattcggcgctctcaccg

SEQ ID NO: 55907 - DNA, 26 bp, Homo sapiens
  source 1..26: mol_type = genomic DNA
gtaagttgcaatacttaatttctgcc

SEQ ID NO: 55908 - DNA, 37 bp, Homo sapiens; identical to SEQ ID NO: 30078
  source 1..37: mol_type = genomic DNA

SEQ ID NO: 55909 - DNA, 33 bp, Homo sapiens; identical to SEQ ID NO: 2852
  source 1..33: mol_type = genomic DNA

SEQ ID NO: 55910 - DNA, 24 bp, Homo sapiens
  source 1..24: mol_type = genomic DNA
aagttgcaatacttaatttctgcc

SEQ ID NO: 55911 - DNA, 26 bp, Homo sapiens
  source 1..26: mol_type = genomic DNA
aagctcacaagaactgctaactcatg

SEQ ID NO: 55912 - DNA, 35 bp, Homo sapiens; identical to SEQ ID NO: 8370
  source 1..35: mol_type = genomic DNA

SEQ ID NO: 55913 - DNA, 41 bp, Homo sapiens; identical to SEQ ID NO: 23029
  source 1..41: mol_type = genomic DNA

SEQ ID NO: 55914 - DNA, 31 bp, Homo sapiens; identical to SEQ ID NO: 8306
  source 1..31: mol_type = genomic DNA

SEQ ID NO: 55915 - DNA, 34 bp, Homo sapiens; identical to SEQ ID NO: 13076
  source 1..34: mol_type = genomic DNA

SEQ ID NO: 55916 - DNA, 41 bp, Homo sapiens; identical to SEQ ID NO: 23001
  source 1..41: mol_type = genomic DNA

SEQ ID NO: 55917 - DNA, 17 bp, Homo sapiens
  source 1..17: mol_type = genomic DNA
atcctatatatcttacc

SEQ ID NO: 55918 - DNA, 18 bp, Homo sapiens
  source 1..18: mol_type = genomic DNA
tcaaatcccggacgagcc

SEQ ID NO: 55919 - DNA, 22 bp, Homo sapiens
  source 1..22: mol_type = genomic DNA
gtggggttttgcagtccttacc

SEQ ID NO: 55920 - DNA, 19 bp, Homo sapiens
  source 1..19: mol_type = genomic DNA
cagaccaagagccttcaaa

SEQ ID NO: 55921 - DNA, 20 bp, Homo sapiens
  source 1..20: mol_type = genomic DNA
aggttcgaatcctgccgact

SEQ ID NO: 55922 - DNA, 19 bp, Homo sapiens
  source 1..19: mol_type = genomic DNA
tctaaaggtccctggttcg

SEQ ID NO: 55923 - DNA, 23 bp, Homo sapiens
  source 1..23: mol_type = genomic DNA
gtaatcgcataaaacttaaaact

SEQ ID NO: 55924 - DNA, 43 bp, Homo sapiens; identical to SEQ ID NO: 15268
  source 1..43: mol_type = genomic DNA

SEQ ID NO: 55925 - DNA, 17 bp, Homo sapiens
  source 1..17: mol_type = genomic DNA
tcccgggcggaaacacc

SEQ ID NO: 55926 - DNA, 16 bp, Homo sapiens
  source 1..16: mol_type = genomic DNA
gttatcacgtctgctt

SEQ ID NO: 55927 - DNA, 17 bp, Homo sapiens
  source 1..17: mol_type = genomic DNA
gctagctcagtcggtag

SEQ ID NO: 55928 - DNA, 21 bp, Homo sapiens
  source 1..21: mol_type = genomic DNA
tcaggatggccgagcggtcta

SEQ ID NO: 55929 - DNA, 24 bp, Homo sapiens
  source 1..24: mol_type = genomic DNA
cttaggagatttcaacttaacttg

SEQ ID NO: 55930 - DNA, 23 bp, Homo sapiens
  source 1..23: mol_type = genomic DNA
gtttaaccaaaacatcagattgt

SEQ ID NO: 55931 - DNA, 21 bp, Homo sapiens
  source 1..21: mol_type = genomic DNA
gtggtagagcatttgactgca

SEQ ID NO: 55932 - DNA, 23 bp, Homo sapiens
  source 1..23: mol_type = genomic DNA
catcagattgtgaatctgacaac

SEQ ID NO: 55933 - DNA, 25 bp, Homo sapiens
  source 1..25: mol_type = genomic DNA
aagcattggactgtaaatctaaaga

SEQ ID NO: 55934 - DNA, 34 bp, Homo sapiens; identical to SEQ ID NO: 12013
  source 1..34: mol_type = genomic DNA

SEQ ID NO: 55935 - DNA, 32 bp, Homo sapiens; identical to SEQ ID NO: 12011
  source 1..32: mol_type = genomic DNA

SEQ ID NO: 55936 - DNA, 32 bp, Homo sapiens; identical to SEQ ID NO: 18195
  source 1..32: mol_type = genomic DNA

SEQ ID NO: 55937 - DNA, 16 bp, Homo sapiens
  source 1..16: mol_type = genomic DNA
tctcatagtcctagcc

SEQ ID NO: 55938 - DNA, 32 bp, Homo sapiens; identical to SEQ ID NO: 17583
  source 1..32: mol_type = genomic DNA

SEQ ID NO: 55939 - DNA, 32 bp, Homo sapiens; identical to SEQ ID NO: 8398
  source 1..32: mol_type = genomic DNA

SEQ ID NO: 55940 - DNA, 40 bp, Homo sapiens; identical to SEQ ID NO: 1732
  source 1..40: mol_type = genomic DNA

SEQ ID NO: 55941 - DNA, 20 bp, Homo sapiens
  source 1..20: mol_type = genomic DNA
agactcaagttctggtctcc

SEQ ID NO: 55942 - DNA, 31 bp, Homo sapiens; identical to SEQ ID NO: 10416
  source 1..31: mol_type = genomic DNA

SEQ ID NO: 55943 - DNA, 24 bp, Homo sapiens
  source 1..24: mol_type = genomic DNA
aaagctcacaagaactgctaactc

SEQ ID NO: 55944 - DNA, 26 bp, Homo sapiens
  source 1..26: mol_type = genomic DNA
gcggcccgggttcgactcccggtgtg

SEQ ID NO: 55945 - DNA, 27 bp, Homo sapiens
  source 1..27: mol_type = genomic DNA
tgggttcgattctcatagtcctagcca

SEQ ID NO: 55946 - DNA, 29 bp, Homo sapiens
  source 1..29: mol_type = genomic DNA
gaaaaagtcatggaggccatggggttggc

SEQ ID NO: 55947 - DNA, 27 bp, Homo sapiens
  source 1..27: mol_type = genomic DNA
tagtgtagtggttatcacgtctgcttt

SEQ ID NO: 55948 - DNA, 17 bp, Homo sapiens
  source 1..17: mol_type = genomic DNA
actgggcggaaacacca

SEQ ID NO: 55949 - DNA, 24 bp, Homo sapiens
  source 1..24: mol_type = genomic DNA
agtgtagtggtcatcacgttcgcc

SEQ ID NO: 55950 - DNA, 29 bp, Homo sapiens
  source 1..29: mol_type = genomic DNA
ccatgtctaacaacatggctttctcacca

SEQ ID NO: 55951 - DNA, 18 bp, Homo sapiens
  source 1..18: mol_type = genomic DNA
ttcgattcccgggcggcg

SEQ ID NO: 55952 - DNA, 20 bp, Homo sapiens
  source 1..20: mol_type = genomic DNA
caacattcaaaaaagagtac

SEQ ID NO: 55953 - DNA, 23 bp, Homo sapiens
  source 1..23: mol_type = genomic DNA
gttcgattcccgggcggcgcacc

SEQ ID NO: 55954 - DNA, 19 bp, Homo sapiens
  source 1..19: mol_type = genomic DNA
gccctcttagcgcagcggg

SEQ ID NO: 55955 - DNA, 32 bp, Homo sapiens; identical to SEQ ID NO: 26041
  source 1..32: mol_type = genomic DNA

SEQ ID NO: 55956 - DNA, 23 bp, Homo sapiens
  source 1..23: mol_type = genomic DNA
cagcttcaaacctgccggggctt

SEQ ID NO: 55957 - DNA, 24 bp, Homo sapiens
  source 1..24: mol_type = genomic DNA
cagattgtgaatctgacaacagag

SEQ ID NO: 55958 - DNA, 18 bp, Homo sapiens
  source 1..18: mol_type = genomic DNA
gttcgaatcccactcctg

SEQ ID NO: 55959 - DNA, 24 bp, Homo sapiens
  source 1..24: mol_type = genomic DNA
gcggcccgggttcgattcccggtc

SEQ ID NO: 55960 - DNA, 17 bp, Homo sapiens
  source 1..17: mol_type = genomic DNA
accggagatgaaaacct

SEQ ID NO: 55961 - DNA, 34 bp, Homo sapiens; identical to SEQ ID NO: 19282
  source 1..34: mol_type = genomic DNA

SEQ ID NO: 55962 - DNA, 37 bp, Homo sapiens; identical to SEQ ID NO: 22460
  source 1..37: mol_type = genomic DNA

SEQ ID NO: 55963 - DNA, 29 bp, Homo sapiens
  source 1..29: mol_type = genomic DNA
agaaagctcacaagaactgctaactcatg

SEQ ID NO: 55964 - DNA, 35 bp, Homo sapiens; identical to SEQ ID NO: 6892
  source 1..35: mol_type = genomic DNA

SEQ ID NO: 55965 - DNA, 28 bp, Homo sapiens
  source 1..28: mol_type = genomic DNA
gaaagctcacaagaactgctaactcatg

SEQ ID NO: 55966 - DNA, 26 bp, Homo sapiens
  source 1..26: mol_type = genomic DNA
tgtgggttcgagtcccatctgggtcg

SEQ ID NO: 55967 - DNA, 31 bp, Homo sapiens; identical to SEQ ID NO: 12560
  source 1..31: mol_type = genomic DNA

SEQ ID NO: 55968 - DNA, 41 bp, Homo sapiens; identical to SEQ ID NO: 25334
  source 1..41: mol_type = genomic DNA

SEQ ID NO: 55969 - DNA, 27 bp, Homo sapiens
  source 1..27: mol_type = genomic DNA
gggagaccggggttcgattccccgacg

SEQ ID NO: 55970 - DNA, 17 bp, Homo sapiens
  source 1..17: mol_type = genomic DNA
acacgcagaaggtcctg

SEQ ID NO: 55971 - DNA, 19 bp, Homo sapiens
  source 1..19: mol_type = genomic DNA
taaaccgaagatcgcgggt

SEQ ID NO: 55972 - DNA, 29 bp, Homo sapiens
  source 1..29: mol_type = genomic DNA
cccgggttcaatccccggcacctccacca

SEQ ID NO: 55973 - DNA, 27 bp, Homo sapiens
  source 1..27: mol_type = genomic DNA
agtcggtagagcatcagacttttaatc

SEQ ID NO: 55974 - DNA, 29 bp, Homo sapiens
  source 1..29: mol_type = genomic DNA
aaggtcctgggttcgagccccagtggaac

SEQ ID NO: 55975 - DNA, 18 bp, Homo sapiens
  source 1..18: mol_type = genomic DNA
aaccaggcggaaacacca

SEQ ID NO: 55976 - DNA, 22 bp, Homo sapiens
  source 1..22: mol_type = genomic DNA
acaaaacgaatgatttcgactc

SEQ ID NO: 55977 - DNA, 24 bp, Homo sapiens
  source 1..24: mol_type = genomic DNA
accaaaacatcagattgtgaatct

SEQ ID NO: 55978 - DNA, 28 bp, Homo sapiens
  source 1..28: mol_type = genomic DNA
gcccccatgtctaacaacatggctttct

SEQ ID NO: 55979 - DNA, 23 bp, Homo sapiens
  source 1..23: mol_type = genomic DNA
acaaaacgaatgatttcgactca

SEQ ID NO: 55980 - DNA, 18 bp, Homo sapiens
  source 1..18: mol_type = genomic DNA
cccccatgtctaacaaca

SEQ ID NO: 55981 - DNA, 16 bp, Homo sapiens
  source 1..16: mol_type = genomic DNA
tccttccttttttgcc

SEQ ID NO: 55982 - DNA, 19 bp, Homo sapiens
  source 1..19: mol_type = genomic DNA
agcacccaacttacactta

SEQ ID NO: 55983 - DNA, 27 bp, Homo sapiens
  source 1..27: mol_type = genomic DNA
ccgaaaatgttggttatacccttcccg

SEQ ID NO: 55984 - DNA, 24 bp, Homo sapiens
  source 1..24: mol_type = genomic DNA
gaagcattggactgtaaatctaaa

SEQ ID NO: 55985 - DNA, 39 bp, Homo sapiens; identical to SEQ ID NO: 3227
  source 1..39: mol_type = genomic DNA

SEQ ID NO: 55986 - DNA, 23 bp, Homo sapiens
  source 1..23: mol_type = genomic DNA
gggttcgattctcatagtcctag

SEQ ID NO: 55987 - DNA, 27 bp, Homo sapiens
  source 1..27: mol_type = genomic DNA
aaagctcacaagaactgctaactcatg

SEQ ID NO: 55988 - DNA, 26 bp, Homo sapiens
  source 1..26: mol_type = genomic DNA
gctggtgtagtggtatcatgcaagat

SEQ ID NO: 55989 - DNA, 26 bp, Homo sapiens
  source 1..26: mol_type = genomic DNA
tgggttcgattctcatagtcctagcc

SEQ ID NO: 55990 - DNA, 22 bp, Homo sapiens
  source 1..22: mol_type = genomic DNA
cccattcttgcgacccgggttc

SEQ ID NO: 55991 - DNA, 23 bp, Homo sapiens
  source 1..23: mol_type = genomic DNA
aggcttacgaccccttatttacc

SEQ ID NO: 55992 - DNA, 25 bp, Homo sapiens
  source 1..25: mol_type = genomic DNA
ggagaccggggttcgattccccgac

SEQ ID NO: 55993 - DNA, 29 bp, Homo sapiens
  source 1..29: mol_type = genomic DNA
atggtggttcagtggtagaattctcgcct

SEQ ID NO: 55994 - DNA, 19 bp, Homo sapiens
  source 1..19: mol_type = genomic DNA
gttcgattcccggccaatg

SEQ ID NO: 55995 - DNA, 19 bp, Homo sapiens
  source 1..19: mol_type = genomic DNA
gactttgaatccagcgatc

SEQ ID NO: 55996 - DNA, 25 bp, Homo sapiens
  source 1..25: mol_type = genomic DNA
gctcagtcggtagagcatgagactc

SEQ ID NO: 55997 - DNA, 22 bp, Homo sapiens
  source 1..22: mol_type = genomic DNA
gtggttatcacgttcgcctcac

SEQ ID NO: 55998 - DNA, 16 bp, Homo sapiens
  source 1..16: mol_type = genomic DNA
atctcggtgggacctc

SEQ ID NO: 55999 - DNA, 47 bp, Homo sapiens; identical to SEQ ID NO: 17151
  source 1..47: mol_type = genomic DNA

SEQ ID NO: 56000 - DNA, 20 bp, Homo sapiens
  source 1..20: mol_type = genomic DNA
cgactcccggtgtgggaacc

SEQ ID NO: 56001 - DNA, 24 bp, Homo sapiens
  source 1..24: mol_type = genomic DNA
ggttcgactcctggctggctcgcc

SEQ ID NO: 56002 - DNA, 37 bp, Homo sapiens; identical to SEQ ID NO: 24955
  source 1..37: mol_type = genomic DNA

SEQ ID NO: 56003 - DNA, 21 bp, Homo sapiens
  source 1..21: mol_type = genomic DNA
cgtagtcgtggccgagtggtt

SEQ ID NO: 56004 - DNA, 23 bp, Homo sapiens
  source 1..23: mol_type = genomic DNA
gttcgattcccggccaacgcacc

SEQ ID NO: 56005 - DNA, 22 bp, Homo sapiens
  source 1..22: mol_type = genomic DNA
ttcgagtctcggtggaacctcc

SEQ ID NO: 56006 - DNA, 23 bp, Homo sapiens
  source 1..23: mol_type = genomic DNA
tagtggctaggattcggcgcttt

SEQ ID NO: 56007 - DNA, 17 bp, Homo sapiens
  source 1..17: mol_type = genomic DNA
gcagcaacctcggttcg

SEQ ID NO: 56008 - DNA, 21 bp, Homo sapiens
  source 1..21: mol_type = genomic DNA
gctttggggggttcgattcct

SEQ ID NO: 56009 - DNA, 24 bp, Homo sapiens
  source 1..24: mol_type = genomic DNA
tagtggttagtatccccgcctgtc

SEQ ID NO: 56010 - DNA, 43 bp, Homo sapiens; identical to SEQ ID NO: 19903
  source 1..43: mol_type = genomic DNA

SEQ ID NO: 56011 - DNA, 19 bp, Homo sapiens
  source 1..19: mol_type = genomic DNA
tcgaatccggctcgaagga

SEQ ID NO: 56012 - DNA, 19 bp, Homo sapiens
  source 1..19: mol_type = genomic DNA
cccattcttgcgacccggg

SEQ ID NO: 56013 - DNA, 25 bp, Homo sapiens
  source 1..25: mol_type = genomic DNA
ggtagaattctcgcctgccacgcgg

SEQ ID NO: 56014 - DNA, 20 bp, Homo sapiens
  source 1..20: mol_type = genomic DNA
aggtcctgggttcgagcccc

SEQ ID NO: 56015 - DNA, 19 bp, Homo sapiens
  source 1..19: mol_type = genomic DNA
cataatctgaaggtcctga

SEQ ID NO: 56016 - DNA, 41 bp, Homo sapiens; identical to SEQ ID NO: 23366
  source 1..41: mol_type = genomic DNA

SEQ ID NO: 56017 - DNA, 31 bp, Homo sapiens; identical to SEQ ID NO: 10702
  source 1..31: mol_type = genomic DNA

SEQ ID NO: 56018 - DNA, 40 bp, Homo sapiens; identical to SEQ ID NO: 30354
  source 1..40: mol_type = genomic DNA

SEQ ID NO: 56019 - DNA, 43 bp, Homo sapiens; identical to SEQ ID NO: 22551
  source 1..43: mol_type = genomic DNA

SEQ ID NO: 56020 - DNA, 28 bp, Homo sapiens
  source 1..28: mol_type = genomic DNA
cggatagctcagtcggtagagcatcaga

SEQ ID NO: 56021 - DNA, 23 bp, Homo sapiens
  source 1..23: mol_type = genomic DNA
gtaaataataggagcttaaaccc

SEQ ID NO: 56022 - DNA, 16 bp, Homo sapiens
  source 1..16: mol_type = genomic DNA
tccgtggcgcaatgga

SEQ ID NO: 56023 - DNA, 21 bp, Homo sapiens
  source 1..21: mol_type = genomic DNA
taggattcggcgctctcaccg

SEQ ID NO: 56024 - DNA, 32 bp, Homo sapiens; identical to SEQ ID NO: 9804
  source 1..32: mol_type = genomic DNA

SEQ ID NO: 56025 - DNA, 16 bp, Homo sapiens
  source 1..16: mol_type = genomic DNA
ccagtggcctaatgga

SEQ ID NO: 56026 - DNA, 16 bp, Homo sapiens
  source 1..16: mol_type = genomic DNA
ttttgcagtccttacc

SEQ ID NO: 56027 - DNA, 25 bp, Homo sapiens
  source 1..25: mol_type = genomic DNA
agattgtgaatctgacaacagaggc

SEQ ID NO: 56028 - DNA, 20 bp, Homo sapiens
  source 1..20: mol_type = genomic DNA
catcagattgtgaatctgac

SEQ ID NO: 56029 - DNA, 26 bp, Homo sapiens
  source 1..26: mol_type = genomic DNA
caacttacacttaggagatttcaact

SEQ ID NO: 56030 - DNA, 19 bp, Homo sapiens
  source 1..19: mol_type = genomic DNA
ggtatagctcagtggtaga

SEQ ID NO: 56031 - DNA, 26 bp, Homo sapiens
  source 1..26: mol_type = genomic DNA
cacccaacttacacttaggagatttc

SEQ ID NO: 56032 - DNA, 44 bp, Homo sapiens; identical to SEQ ID NO: 7610
  source 1..44: mol_type = genomic DNA

SEQ ID NO: 56033 - DNA, 42 bp, Homo sapiens; identical to SEQ ID NO: 14797
  source 1..42: mol_type = genomic DNA

SEQ ID NO: 56034 - DNA, 28 bp, Homo sapiens
  source 1..28: mol_type = genomic DNA
ggatagctcagtcggtagagcatcagac

SEQ ID NO: 56035 - DNA, 16 bp, Homo sapiens
  source 1..16: mol_type = genomic DNA
tccttaggtcgctggt

SEQ ID NO: 56036 - DNA, 26 bp, Homo sapiens
  source 1..26: mol_type = genomic DNA
tggtgtagtggtatcatgcaagattc

SEQ ID NO: 56037 - DNA, 41 bp, Homo sapiens; identical to SEQ ID NO: 23475
  source 1..41: mol_type = genomic DNA

SEQ ID NO: 56038 - DNA, 22 bp, Homo sapiens
  source 1..22: mol_type = genomic DNA
ggggattagctcaaatggtaga

SEQ ID NO: 56039 - DNA, 16 bp, Homo sapiens
  source 1..16: mol_type = genomic DNA
acctctttacagtgac

SEQ ID NO: 56040 - DNA, 26 bp, Homo sapiens
  source 1..26: mol_type = genomic DNA
agctcagtcggtagagcatgagactc

SEQ ID NO: 56041 - DNA, 22 bp, Homo sapiens
  source 1..22: mol_type = genomic DNA
tagagcatgggactcttaatcc

SEQ ID NO: 56042 - DNA, 19 bp, Homo sapiens
  source 1..19: mol_type = genomic DNA
aacttacacttaggagatt

SEQ ID NO: 56043 - DNA, 33 bp, Homo sapiens; identical to SEQ ID NO: 12012
  source 1..33: mol_type = genomic DNA

SEQ ID NO: 56044 - DNA, 32 bp, Homo sapiens; identical to SEQ ID NO: 22473
  source 1..32: mol_type = genomic DNA

SEQ ID NO: 56045 - DNA, 47 bp, Homo sapiens; identical to SEQ ID NO: 12145
  source 1..47: mol_type = genomic DNA

SEQ ID NO: 56046 - DNA, 41 bp, Homo sapiens; identical to SEQ ID NO: 23372
  source 1..41: mol_type = genomic DNA

SEQ ID NO: 56047 - DNA, 29 bp, Homo sapiens
  source 1..29: mol_type = genomic DNA
atagctcagtcggtagagcatcagacttt

SEQ ID NO: 56048 - DNA, 21 bp, Homo sapiens
  source 1..21: mol_type = genomic DNA
taacagctatccattggtctt

SEQ ID NO: 56049 - DNA, 17 bp, Homo sapiens
  source 1..17: mol_type = genomic DNA
agcagagtggcgcagcg

SEQ ID NO: 56050 - DNA, 19 bp, Homo sapiens
  source 1..19: mol_type = genomic DNA
taaacccccttatttctac

SEQ ID NO: 56051 - DNA, 26 bp, Homo sapiens
  source 1..26: mol_type = genomic DNA
ttgactgcagatcaagaggtccccgg

SEQ ID NO: 56052 - DNA, 16 bp, Homo sapiens
  source 1..16: mol_type = genomic DNA
tcccattggtctagcc

SEQ ID NO: 56053 - DNA, 18 bp, Homo sapiens
  source 1..18: mol_type = genomic DNA
actcatgcccccatgtct

SEQ ID NO: 56054 - DNA, 18 bp, Homo sapiens
  source 1..18: mol_type = genomic DNA
aattttggtgcaactcca

SEQ ID NO: 56055 - DNA, 47 bp, Homo sapiens; identical to SEQ ID NO: 10366
  source 1..47: mol_type = genomic DNA

SEQ ID NO: 56056 - DNA, 18 bp, Homo sapiens
  source 1..18: mol_type = genomic DNA
gtggttatcacgtctgct

SEQ ID NO: 56057 - DNA, 23 bp, Homo sapiens
  source 1..23: mol_type = genomic DNA
aagctcacaagaactgctaactc

SEQ ID NO: 56058 - DNA, 17 bp, Homo sapiens
  source 1..17: mol_type = genomic DNA
gtatgattctcgctttg

SEQ ID NO: 56059 - DNA, 27 bp, Homo sapiens
  source 1..27: mol_type = genomic DNA
gcggcccgggttcgactcccggtgtgg

SEQ ID NO: 56060 - DNA, 27 bp, Homo sapiens
  source 1..27: mol_type = genomic DNA
ggtaatcgcataaaacttaaaacttta

SEQ ID NO: 56061 - DNA, 22 bp, Homo sapiens
  source 1..22: mol_type = genomic DNA
tttgcacgtatgaggccccggg

SEQ ID NO: 56062 - DNA, 34 bp, Homo sapiens; identical to SEQ ID NO: 19921
  source 1..34: mol_type = genomic DNA

SEQ ID NO: 56063 - DNA, 17 bp, Homo sapiens
  source 1..17: mol_type = genomic DNA
acgaatgatttcgactc

SEQ ID NO: 56064 - DNA, 23 bp, Homo sapiens
  source 1..23: mol_type = genomic DNA
gctcagtcggtagagcatgagac

SEQ ID NO: 56065 - DNA, 17 bp, Homo sapiens
  source 1..17: mol_type = genomic DNA
tgagtgaagcattggac

SEQ ID NO: 56066 - DNA, 19 bp, Homo sapiens
  source 1..19: mol_type = genomic DNA
gagaaccaacacctcttta

SEQ ID NO: 56067 - DNA, 16 bp, Homo sapiens
  source 1..16: mol_type = genomic DNA
ccagtggcgcaatgga

SEQ ID NO: 56068 - DNA, 20 bp, Homo sapiens
  source 1..20: mol_type = genomic DNA
ggttatcacattcgcctcac

SEQ ID NO: 56069 - DNA, 46 bp, Homo sapiens; identical to SEQ ID NO: 9934
  source 1..46: mol_type = genomic DNA

SEQ ID NO: 56070 - DNA, 28 bp, Homo sapiens
  source 1..28: mol_type = genomic DNA
cagaggcttacgaccccttatttacccc

SEQ ID NO: 56071 - DNA, 28 bp, Homo sapiens
  source 1..28: mol_type = genomic DNA
catggtctagcggttaggattcctggtt

SEQ ID NO: 56072 - DNA, 22 bp, Homo sapiens
  source 1..22: mol_type = genomic DNA
ttcgattctcatagtcctagcc

SEQ ID NO: 56073 - DNA, 16 bp, Homo sapiens
  source 1..16: mol_type = genomic DNA
gtcggtagagcatggg

SEQ ID NO: 56074 - DNA, 26 bp, Homo sapiens
  source 1..26: mol_type = genomic DNA
cagagtggggttttgcagtccttacc

SEQ ID NO: 56075 - DNA, 18 bp, Homo sapiens
  source 1..18: mol_type = genomic DNA
cgatcccgggtttcggca

SEQ ID NO: 56076 - DNA, 18 bp, Homo sapiens
  source 1..18: mol_type = genomic DNA
atacccttcccgtactac

SEQ ID NO: 56077 - DNA, 23 bp, Homo sapiens
  source 1..23: mol_type = genomic DNA
gttcgagtcccatctggggtgcc

SEQ ID NO: 56078 - DNA, 26 bp, Homo sapiens
  source 1..26: mol_type = genomic DNA
cgctctcaccgccgcggcccgggttc

SEQ ID NO: 56079 - DNA, 16 bp, Homo sapiens
  source 1..16: mol_type = genomic DNA
atcccaccctcgtcgc

SEQ ID NO: 56080 - DNA, 23 bp, Homo sapiens
  source 1..23: mol_type = genomic DNA
atggtttttcatatcattggtcg

SEQ ID NO: 56081 - DNA, 19 bp, Homo sapiens
  source 1..19: mol_type = genomic DNA
agaaatatgtctgataaaa

SEQ ID NO: 56082 - DNA, 25 bp, Homo sapiens
  source 1..25: mol_type = genomic DNA
gctagctcagtcggtagagcatgag

SEQ ID NO: 56083 - DNA, 21 bp, Homo sapiens
  source 1..21: mol_type = genomic DNA
ttctgtagtgtagtggttatc

SEQ ID NO: 56084 - DNA, 34 bp, Homo sapiens; identical to SEQ ID NO: 950
  source 1..34: mol_type = genomic DNA

SEQ ID NO: 56085 - DNA, 36 bp, Homo sapiens; identical to SEQ ID NO: 8591
  source 1..36: mol_type = genomic DNA

SEQ ID NO: 56086 - DNA, 24 bp, Homo sapiens
  source 1..24: mol_type = genomic DNA
ccggatagctcagtcggtagagca

SEQ ID NO: 56087 - DNA, 24 bp, Homo sapiens
  source 1..24: mol_type = genomic DNA
ggagcttaaacccccttatttcta

SEQ ID NO: 56088 - DNA, 19 bp, Homo sapiens
  source 1..19: mol_type = genomic DNA
gatgcagagtggggttttg

SEQ ID NO: 56089 - DNA, 18 bp, Homo sapiens
  source 1..18: mol_type = genomic DNA
tctcttcgggggcgtggg

SEQ ID NO: 56090 - DNA, 18 bp, Homo sapiens
  source 1..18: mol_type = genomic DNA
tcaaagcaatacactgaa

SEQ ID NO: 56091 - DNA, 23 bp, Homo sapiens
  source 1..23: mol_type = genomic DNA
ttaagttaaagattaagagaacc

SEQ ID NO: 56092 - DNA, 23 bp, Homo sapiens
  source 1..23: mol_type = genomic DNA
aaaatgttggttatacccttccc

SEQ ID NO: 56093 - DNA, 24 bp, Homo sapiens
  source 1..24: mol_type = genomic DNA
ctcttaatctcagggtcgtgggtt

SEQ ID NO: 56094 - DNA, 28 bp, Homo sapiens
  source 1..28: mol_type = genomic DNA
agtaagttgcaatacttaatttctgcca

SEQ ID NO: 56095 - DNA, 32 bp, Homo sapiens; identical to SEQ ID NO: 18692
  source 1..32: mol_type = genomic DNA

SEQ ID NO: 56096 - DNA, 43 bp, Homo sapiens; identical to SEQ ID NO: 16650
  source 1..43: mol_type = genomic DNA

SEQ ID NO: 56097 - DNA, 26 bp, Homo sapiens
  source 1..26: mol_type = genomic DNA
taagttgcaatacttaatttctgcca

SEQ ID NO: 56098 - DNA, 19 bp, Homo sapiens
  source 1..19: mol_type = genomic DNA
cggtagagcatgggactct

SEQ ID NO: 56099 - DNA, 37 bp, Homo sapiens; identical to SEQ ID NO: 27924
  source 1..37: mol_type = genomic DNA

SEQ ID NO: 56100 - DNA, 30 bp, Homo sapiens; identical to SEQ ID NO: 23652
  source 1..30: mol_type = genomic DNA

SEQ ID NO: 56101 - DNA, 16 bp, Homo sapiens
  source 1..16: mol_type = genomic DNA
ttcgattccccgacgg

SEQ ID NO: 56102 - DNA, 24 bp, Homo sapiens
  source 1..24: mol_type = genomic DNA
ggttcgaatcccaccgctgccacc

SEQ ID NO: 56103 - DNA, 18 bp, Homo sapiens
  source 1..18: mol_type = genomic DNA
tggtgagtatccccgcct

SEQ ID NO: 56104 - DNA, 16 bp, Homo sapiens
  source 1..16: mol_type = genomic DNA
ggtagagcatgggact

SEQ ID NO: 56105 - DNA, 18 bp, Homo sapiens
  source 1..18: mol_type = genomic DNA
aacacctctttacagtga

SEQ ID NO: 56106 - DNA, 28 bp, Homo sapiens
  source 1..28: mol_type = genomic DNA
gagatgaaaacctttttccaaggacacc

SEQ ID NO: 56107 - DNA, 34 bp, Homo sapiens; identical to SEQ ID NO: 13078
  source 1..34: mol_type = genomic DNA

SEQ ID NO: 56108 - DNA, 41 bp, Homo sapiens; identical to SEQ ID NO: 28911
  source 1..41: mol_type = genomic DNA

SEQ ID NO: 56109 - DNA, 28 bp, Homo sapiens
  source 1..28: mol_type = genomic DNA
agagaaccaacacctctttacagtgacc

SEQ ID NO: 56110 - DNA, 38 bp, Homo sapiens; identical to SEQ ID NO: 8373
  source 1..38: mol_type = genomic DNA

SEQ ID NO: 56111 - DNA, 31 bp, Homo sapiens; identical to SEQ ID NO: 16402
  source 1..31: mol_type = genomic DNA

SEQ ID NO: 56112 - DNA, 24 bp, Homo sapiens
  source 1..24: mol_type = genomic DNA
tgtctaacaacatggctttctcac

SEQ ID NO: 56113 - DNA, 25 bp, Homo sapiens
  source 1..25: mol_type = genomic DNA
aaccaaaacatcagattgtgaatct

SEQ ID NO: 56114 - DNA, 16 bp, Homo sapiens
  source 1..16: mol_type = genomic DNA
aagtgtttgtgggttt

SEQ ID NO: 56115 - DNA, 18 bp, Homo sapiens
  source 1..18: mol_type = genomic DNA
gagaaccaacacctcttt

SEQ ID NO: 56116 - DNA, 30 bp, Homo sapiens; identical to SEQ ID NO: 13061
  source 1..30: mol_type = genomic DNA

SEQ ID NO: 56117 - DNA, 34 bp, Homo sapiens; identical to SEQ ID NO: 24011
  source 1..34: mol_type = genomic DNA

SEQ ID NO: 56118 - DNA, 33 bp, Homo sapiens; identical to SEQ ID NO: 18693
  source 1..33: mol_type = genomic DNA

SEQ ID NO: 56119 - DNA, 35 bp, Homo sapiens; identical to SEQ ID NO: 24012
  source 1..35: mol_type = genomic DNA

SEQ ID NO: 56120 - DNA, 31 bp, Homo sapiens; identical to SEQ ID NO: 16340
  source 1..31: mol_type = genomic DNA

SEQ ID NO: 56121 - DNA, 28 bp, Homo sapiens
  source 1..28: mol_type = genomic DNA
gtggtctagtggttaggattcggcgctc

SEQ ID NO: 56122 - DNA, 30 bp, Homo sapiens; identical to SEQ ID NO: 26928
  source 1..30: mol_type = genomic DNA

SEQ ID NO: 56123 - DNA, 21 bp, Homo sapiens
  source 1..21: mol_type = genomic DNA
ttcacccaggcggcccgggtt

SEQ ID NO: 56124 - DNA, 35 bp, Homo sapiens; identical to SEQ ID NO: 29265
  source 1..35: mol_type = genomic DNA

SEQ ID NO: 56125 - DNA, 33 bp, Homo sapiens; identical to SEQ ID NO: 18196
  source 1..33: mol_type = genomic DNA

SEQ ID NO: 56126 - DNA, 33 bp, Homo sapiens; identical to SEQ ID NO: 19364
  source 1..33: mol_type = genomic DNA

SEQ ID NO: 56127 - DNA, 21 bp, Homo sapiens
  source 1..21: mol_type = genomic DNA
gacttaagatccaatggacat

SEQ ID NO: 56128 - DNA, 19 bp, Homo sapiens
  source 1..19: mol_type = genomic DNA
gttcgattcccggccaacg

SEQ ID NO: 56129 - DNA, 23 bp, Homo sapiens
  source 1..23: mol_type = genomic DNA
ggttcgattccggctcgaaggac

SEQ ID NO: 56130 - DNA, 27 bp, Homo sapiens
  source 1..27: mol_type = genomic DNA
cgttggtggtatagtggttagcatagc

SEQ ID NO: 56131 - DNA, 37 bp, Homo sapiens; identical to SEQ ID NO: 3485
  source 1..37: mol_type = genomic DNA

SEQ ID NO: 56132 - DNA, 34 bp, Homo sapiens; identical to SEQ ID NO: 22537
  source 1..34: mol_type = genomic DNA

SEQ ID NO: 56133 - DNA, 29 bp, Homo sapiens
  source 1..29: mol_type = genomic DNA
ataggagcttaaacccccttatttctacc

SEQ ID NO: 56134 - DNA, 20 bp, Homo sapiens
  source 1..20: mol_type = genomic DNA
aacattcaaaaaagagtacc

SEQ ID NO: 56135 - DNA, 17 bp, Homo sapiens
  source 1..17: mol_type = genomic DNA
ggtaatcgcataaaact

SEQ ID NO: 56136 - DNA, 22 bp, Homo sapiens
  source 1..22: mol_type = genomic DNA
gttcgatccccgtacgggccac

SEQ ID NO: 56137 - DNA, 31 bp, Homo sapiens; identical to SEQ ID NO: 17336
  source 1..31: mol_type = genomic DNA

SEQ ID NO: 56138 - DNA, 24 bp, Homo sapiens
  source 1..24: mol_type = genomic DNA
cgaaaatgttggttatacccttcc

SEQ ID NO: 56139 - DNA, 27 bp, Homo sapiens
  source 1..27: mol_type = genomic DNA
acaggggttaggcctctttttaccacc

SEQ ID NO: 56140 - DNA, 29 bp, Homo sapiens
  source 1..29: mol_type = genomic DNA
agccgtgatcgtatagtggttagtactct

SEQ ID NO: 56141 - DNA, 23 bp, Homo sapiens
  source 1..23: mol_type = genomic DNA
gactctgaatccagcgatccgag

SEQ ID NO: 56142 - DNA, 22 bp, Homo sapiens
  source 1..22: mol_type = genomic DNA
cttaggagatttcaacttaact

SEQ ID NO: 56143 - DNA, 29 bp, Homo sapiens
  source 1..29: mol_type = genomic DNA
cgtagtgtagtggttatcacgttcgcctc

SEQ ID NO: 56144 - DNA, 25 bp, Homo sapiens
  source 1..25: mol_type = genomic DNA
gggtttaagtcccattggtctagcc

SEQ ID NO: 56145 - DNA, 31 bp, Homo sapiens; identical to SEQ ID NO: 17800
  source 1..31: mol_type = genomic DNA

SEQ ID NO: 56146 - DNA, 22 bp, Homo sapiens
  source 1..22: mol_type = genomic DNA
gagcttaaacccccttatttct

SEQ ID NO: 56147 - DNA, 30 bp, Homo sapiens; identical to SEQ ID NO: 24958
  source 1..30: mol_type = genomic DNA

SEQ ID NO: 56148 - DNA, 32 bp, Homo sapiens; identical to SEQ ID NO: 18449
  source 1..32: mol_type = genomic DNA

SEQ ID NO: 56149 - DNA, 32 bp, Homo sapiens; identical to SEQ ID NO: 17337
  source 1..32: mol_type = genomic DNA

SEQ ID NO: 56150 - DNA, 32 bp, Homo sapiens; identical to SEQ ID NO: 17360
  source 1..32: mol_type = genomic DNA

SEQ ID NO: 56151 - DNA, 18 bp, Homo sapiens
  source 1..18: mol_type = genomic DNA
attggtggttcagtggta

SEQ ID NO: 56152 - DNA, 18 bp, Homo sapiens
  source 1..18: mol_type = genomic DNA
tgagtgaagcattggact

SEQ ID NO: 56153 - DNA, 16 bp, Homo sapiens
  source 1..16: mol_type = genomic DNA
cccacctggggtgcca

SEQ ID NO: 56154 - DNA, 19 bp, Homo sapiens
  source 1..19: mol_type = genomic DNA
aaacccccttatttctacc

SEQ ID NO: 56155 - DNA, 19 bp, Homo sapiens
  source 1..19: mol_type = genomic DNA
aacaacatggctttctcac

SEQ ID NO: 56156 - DNA, 25 bp, Homo sapiens
  source 1..25: mol_type = genomic DNA
gctctcaccgccgcggcccgggttc

SEQ ID NO: 56157 - DNA, 21 bp, Homo sapiens
  source 1..21: mol_type = genomic DNA
aatggtggagttaaagacttt

SEQ ID NO: 56158 - DNA, 25 bp, Homo sapiens
  source 1..25: mol_type = genomic DNA
tggttaggattcggcgctctcaccg

SEQ ID NO: 56159 - DNA, 16 bp, Homo sapiens
  source 1..16: mol_type = genomic DNA
ggattcggcgctctca

SEQ ID NO: 56160 - DNA, 17 bp, Homo sapiens
  source 1..17: mol_type = genomic DNA
cctcctcaaagcaatac

SEQ ID NO: 56161 - DNA, 23 bp, Homo sapiens
  source 1..23: mol_type = genomic DNA
aagcacccaacttacacttagga

SEQ ID NO: 56162 - DNA, 40 bp, Homo sapiens; identical to SEQ ID NO: 27170
  source 1..40: mol_type = genomic DNA

SEQ ID NO: 56163 - DNA, 27 bp, Homo sapiens
  source 1..27: mol_type = genomic DNA
agagaaccaacacctctttacagtgac

SEQ ID NO: 56164 - DNA, 24 bp, Homo sapiens
  source 1..24: mol_type = genomic DNA
gtccttgtagtataaactaataca

SEQ ID NO: 56165 - DNA, 16 bp, Homo sapiens
  source 1..16: mol_type = genomic DNA
ggttaggattcctggt

SEQ ID NO: 56166 - DNA, 20 bp, Homo sapiens
  source 1..20: mol_type = genomic DNA
tagtggttatcacgtctgct

SEQ ID NO: 56167 - DNA, 26 bp, Homo sapiens
  source 1..26: mol_type = genomic DNA
gggttcgattctcatagtcctagcca

SEQ ID NO: 56168 - DNA, 23 bp, Homo sapiens
  source 1..23: mol_type = genomic DNA
gtgagtatccccgcctgtcacgc

SEQ ID NO: 56169 - DNA, 18 bp, Homo sapiens
  source 1..18: mol_type = genomic DNA
cctcctcaaagcaataca

SEQ ID NO: 56170 - DNA, 25 bp, Homo sapiens
  source 1..25: mol_type = genomic DNA
acagctatccattggtcttaggccc

SEQ ID NO: 56171 - DNA, 28 bp, Homo sapiens
  source 1..28: mol_type = genomic DNA
gttaactaagtgtttgtgggtttaagtc

SEQ ID NO: 56172 - DNA, 35 bp, Homo sapiens; identical to SEQ ID NO: 18284
  source 1..35: mol_type = genomic DNA

SEQ ID NO: 56173 - DNA, 26 bp, Homo sapiens
  source 1..26: mol_type = genomic DNA
atagctcagtcggtagagcatcagac

SEQ ID NO: 56174 - DNA, 40 bp, Homo sapiens; identical to SEQ ID NO: 25710
  source 1..40: mol_type = genomic DNA

SEQ ID NO: 56175 - DNA, 22 bp, Homo sapiens
  source 1..22: mol_type = genomic DNA
ttcgactcctggctggctcgcc

SEQ ID NO: 56176 - DNA, 25 bp, Homo sapiens
  source 1..25: mol_type = genomic DNA
tgacaacattcaaaaaagagtacca

SEQ ID NO: 56177 - DNA, 20 bp, Homo sapiens
  source 1..20: mol_type = genomic DNA
taagtcccattggtctagcc

SEQ ID NO: 56178 - DNA, 19 bp, Homo sapiens
  source 1..19: mol_type = genomic DNA
tcgatcccgggtttcggca

SEQ ID NO: 56179 - DNA, 16 bp, Homo sapiens
  source 1..16: mol_type = genomic DNA
aatggataaggcactg

SEQ ID NO: 56180 - DNA, 34 bp, Homo sapiens; identical to SEQ ID NO: 16634
  source 1..34: mol_type = genomic DNA

SEQ ID NO: 56181 - DNA, 17 bp, Homo sapiens
  source 1..17: mol_type = genomic DNA
ggttatcacgtctgctt

SEQ ID NO: 56182 - DNA, 19 bp, Homo sapiens
  source 1..19: mol_type = genomic DNA
agtgggtagagcatcagac

SEQ ID NO: 56183 - DNA, 27 bp, Homo sapiens
  source 1..27: mol_type = genomic DNA
gcattggtggttcaatggtagaattct

SEQ ID NO: 56184 - DNA, 34 bp, Homo sapiens; identical to SEQ ID NO: 16641
  source 1..34: mol_type = genomic DNA

SEQ ID NO: 56185 - DNA, 34 bp, Homo sapiens; identical to SEQ ID NO: 18756
  source 1..34: mol_type = genomic DNA

SEQ ID NO: 56186 - DNA, 18 bp, Homo sapiens
  source 1..18: mol_type = genomic DNA
caatacttaatttctgcc

SEQ ID NO: 56187 - DNA, 25 bp, Homo sapiens
  source 1..25: mol_type = genomic DNA
tcgtggttgtagtccgtgcgagaat

SEQ ID NO: 56188 - DNA, 17 bp, Homo sapiens
  source 1..17: mol_type = genomic DNA
cgccgctggtgtagtgg

SEQ ID NO: 56189 - DNA, 20 bp, Homo sapiens
  source 1..20: mol_type = genomic DNA
gtttgtgggtttaagtccca

SEQ ID NO: 56190 - DNA, 16 bp, Homo sapiens
  source 1..16: mol_type = genomic DNA
ttcaaatcccggacga

SEQ ID NO: 56191 - DNA, 31 bp, Homo sapiens; identical to SEQ ID NO: 30884
  source 1..31: mol_type = genomic DNA

SEQ ID NO: 56192 - DNA, 17 bp, Homo sapiens
  source 1..17: mol_type = genomic DNA
tcttaatcccagggtcg

SEQ ID NO: 56193 - DNA, 24 bp, Homo sapiens
  source 1..24: mol_type = genomic DNA
ccctggtggtctagtggttaggat

SEQ ID NO: 56194 - DNA, 18 bp, Homo sapiens
  source 1..18: mol_type = genomic DNA
gaaagctcacaagaactg

SEQ ID NO: 56195 - DNA, 22 bp, Homo sapiens
  source 1..22: mol_type = genomic DNA
gttcgatcccgggtttcggcac

SEQ ID NO: 56196 - DNA, 19 bp, Homo sapiens
  source 1..19: mol_type = genomic DNA
aggattcggcgctctcacc

SEQ ID NO: 56197 - DNA, 25 bp, Homo sapiens
  source 1..25: mol_type = genomic DNA
ggttcgagtcctgccgcggtcgcca

SEQ ID NO: 56198 - DNA, 33 bp, Homo sapiens; identical to SEQ ID NO: 16633
  source 1..33: mol_type = genomic DNA

SEQ ID NO: 56199 - DNA, 16 bp, Homo sapiens
  source 1..16: mol_type = genomic DNA
agctcagtcggtagag

SEQ ID NO: 56200 - DNA, 17 bp, Homo sapiens
  source 1..17: mol_type = genomic DNA
gagtatccccgcctgtc

SEQ ID NO: 56201 - DNA, 20 bp, Homo sapiens
  source 1..20: mol_type = genomic DNA
accaggatggccgagtggtt

SEQ ID NO: 56202 - DNA, 31 bp, Homo sapiens; identical to SEQ ID NO: 16631
  source 1..31: mol_type = genomic DNA

SEQ ID NO: 56203 - DNA, 16 bp, Homo sapiens
  source 1..16: mol_type = genomic DNA
gaactgctaactcatg

SEQ ID NO: 56204 - DNA, 18 bp, Homo sapiens
  source 1..18: mol_type = genomic DNA
tggttcagtggtagaatt

SEQ ID NO: 56205 - DNA, 25 bp, Homo sapiens
  source 1..25: mol_type = genomic DNA
tagctcagtcggtagagcatcagac

SEQ ID NO: 56206 - DNA, 23 bp, Homo sapiens
  source 1..23: mol_type = genomic DNA
gttcaagtccctgttcgggcgcc

SEQ ID NO: 56207 - DNA, 20 bp, Homo sapiens
  source 1..20: mol_type = genomic DNA
gaccaagagccttcaaagcc

SEQ ID NO: 56208 - DNA, 22 bp, Homo sapiens
  source 1..22: mol_type = genomic DNA
actcatgcccccatgtctaaca

SEQ ID NO: 56209 - DNA, 22 bp, Homo sapiens
  source 1..22: mol_type = genomic DNA
ttcgatcccgggtttcggcacc

SEQ ID NO: 56210 - DNA, 18 bp, Homo sapiens
  source 1..18: mol_type = genomic DNA
gcgctctcaccgccgcgg

SEQ ID NO: 56211 - DNA, 24 bp, Homo sapiens
  source 1..24: mol_type = genomic DNA
ggttatcacgttcgcctcacacgc

SEQ ID NO: 56212 - DNA, 18 bp, Homo sapiens
  source 1..18: mol_type = genomic DNA
atcccactgctgccacca

SEQ ID NO: 56213 - DNA, 25 bp, Homo sapiens
  source 1..25: mol_type = genomic DNA
agtgtagtggtcatcacgttcgcct

SEQ ID NO: 56214 - DNA, 29 bp, Homo sapiens
  source 1..29: mol_type = genomic DNA
gagtggcgcagcggaagcgtgctgggccc

SEQ ID NO: 56215 - DNA, 20 bp, Homo sapiens
  source 1..20: mol_type = genomic DNA
tcaaatctcggtgggacctc

SEQ ID NO: 56216 - DNA, 21 bp, Homo sapiens
  source 1..21: mol_type = genomic DNA
atagtggtgagtatccccgcc

SEQ ID NO: 56217 - DNA, 25 bp, Homo sapiens
  source 1..25: mol_type = genomic DNA
ggagcttaaacccccttatttctac

SEQ ID NO: 56218 - DNA, 26 bp, Homo sapiens
  source 1..26: mol_type = genomic DNA
ccgaaaatgttggttatacccttccc

SEQ ID NO: 56219 - DNA, 30 bp, Homo sapiens; identical to SEQ ID NO: 25126
  source 1..30: mol_type = genomic DNA

SEQ ID NO: 56220 - DNA, 21 bp, Homo sapiens
  source 1..21: mol_type = genomic DNA
gtagtggttatcacgtctgct

SEQ ID NO: 56221 - DNA, 22 bp, Homo sapiens
  source 1..22: mol_type = genomic DNA
gctctcaccgccgcggcccggg

SEQ ID NO: 56222 - DNA, 30 bp, Homo sapiens; identical to SEQ ID NO: 15062
  source 1..30: mol_type = genomic DNA

SEQ ID NO: 56223 - DNA, 27 bp, Homo sapiens
  source 1..27: mol_type = genomic DNA
ggcggcccgggttcgactcccggtgtg

SEQ ID NO: 56224 - DNA, 21 bp, Homo sapiens
  source 1..21: mol_type = genomic DNA
tagctttgggtgctaatggtg

SEQ ID NO: 56225 - DNA, 18 bp, Homo sapiens
  source 1..18: mol_type = genomic DNA
atgggtggttcagtggta

SEQ ID NO: 56226 - DNA, 21 bp, Homo sapiens
  source 1..21: mol_type = genomic DNA
gtagaattctcgcctgccacg

SEQ ID NO: 56227 - DNA, 29 bp, Homo sapiens
  source 1..29: mol_type = genomic DNA
gcaacctcggttcgaatccgagtcacggc

SEQ ID NO: 56228 - DNA, 36 bp, Homo sapiens; identical to SEQ ID NO: 16833
  source 1..36: mol_type = genomic DNA

SEQ ID NO: 56229 - DNA, 21 bp, Homo sapiens
  source 1..21: mol_type = genomic DNA
tagtggttatcacgtctgctt

SEQ ID NO: 56230 - DNA, 22 bp, Homo sapiens
  source 1..22: mol_type = genomic DNA
tagtggttatcacgtctgcttt

SEQ ID NO: 56231 - DNA, 18 bp, Homo sapiens
  source 1..18: mol_type = genomic DNA
aggcctctttttaccacc

SEQ ID NO: 56232 - DNA, 22 bp, Homo sapiens
  source 1..22: mol_type = genomic DNA
agcttcaaacctgccggggctt

SEQ ID NO: 56233 - DNA, 18 bp, Homo sapiens
  source 1..18: mol_type = genomic DNA
aacccccttatttctacc

SEQ ID NO: 56234 - DNA, 20 bp, Homo sapiens
  source 1..20: mol_type = genomic DNA
gcctgtcacgcgggagaccg

SEQ ID NO: 56235 - DNA, 23 bp, Homo sapiens
  source 1..23: mol_type = genomic DNA
agcttcaaacctgccggggcttc

SEQ ID NO: 56236 - DNA, 30 bp, Homo sapiens; identical to SEQ ID NO: 28883
  source 1..30: mol_type = genomic DNA

SEQ ID NO: 56237 - DNA, 25 bp, Homo sapiens
  source 1..25: mol_type = genomic DNA
gggttcgattctcatagtcctagcc

SEQ ID NO: 56238 - DNA, 30 bp, Homo sapiens; identical to SEQ ID NO: 24949
  source 1..30: mol_type = genomic DNA

SEQ ID NO: 56239 - DNA, 20 bp, Homo sapiens
  source 1..20: mol_type = genomic DNA
tgtttagacgggctcacatc

SEQ ID NO: 56240 - DNA, 21 bp, Homo sapiens
  source 1..21: mol_type = genomic DNA
gttcgattccttccttttttg

SEQ ID NO: 56241 - DNA, 25 bp, Homo sapiens
  source 1..25: mol_type = genomic DNA
aagttgcaatacttaatttctgcca

SEQ ID NO: 56242 - DNA, 23 bp, Homo sapiens
  source 1..23: mol_type = genomic DNA
tagtactctgcgttgtggccgca

SEQ ID NO: 56243 - DNA, 22 bp, Homo sapiens
  source 1..22: mol_type = genomic DNA
ctcagtcggtagagcatgagac

SEQ ID NO: 56244 - DNA, 24 bp, Homo sapiens
  source 1..24: mol_type = genomic DNA
ggtctaggggtatgattctcgctt

SEQ ID NO: 56245 - DNA, 23 bp, Homo sapiens
  source 1..23: mol_type = genomic DNA
gaaaacctttttccaaggacacc

SEQ ID NO: 56246 - DNA, 30 bp, Homo sapiens; identical to SEQ ID NO: 130
  source 1..30: mol_type = genomic DNA

SEQ ID NO: 56247 - DNA, 20 bp, Homo sapiens
  source 1..20: mol_type = genomic DNA
gctttggggggttcgattcc

SEQ ID NO: 56248 - DNA, 19 bp, Homo sapiens
  source 1..19: mol_type = genomic DNA
gaaccaacacctctttaca

SEQ ID NO: 56249 - DNA, 24 bp, Homo sapiens
  source 1..24: mol_type = genomic DNA
aaccaacacctctttacagtgacc

SEQ ID NO: 56250 - DNA, 35 bp, Homo sapiens; identical to SEQ ID NO: 10909
  source 1..35: mol_type = genomic DNA

SEQ ID NO: 56251 - DNA, 20 bp, Homo sapiens
  source 1..20: mol_type = genomic DNA
gagtggggttttgcagtcct

SEQ ID NO: 56252 - DNA, 28 bp, Homo sapiens
  source 1..28: mol_type = genomic DNA
tcatatcattggtcgtggttgtagtccg

SEQ ID NO: 56253 - DNA, 21 bp, Homo sapiens
  source 1..21: mol_type = genomic DNA
ggttccatagtgtagtggtta

SEQ ID NO: 56254 - DNA, 40 bp, Homo sapiens; identical to SEQ ID NO: 809
  source 1..40: mol_type = genomic DNA

SEQ ID NO: 56255 - DNA, 30 bp, Homo sapiens; identical to SEQ ID NO: 26847
  source 1..30: mol_type = genomic DNA

SEQ ID NO: 56256 - DNA, 18 bp, Homo sapiens
  source 1..18: mol_type = genomic DNA
acgaatgatttcgactca

SEQ ID NO: 56257 - DNA, 29 bp, Homo sapiens
  source 1..29: mol_type = genomic DNA
cagaggcttacgaccccttatttacccca

SEQ ID NO: 56258 - DNA, 40 bp, Homo sapiens; identical to SEQ ID NO: 214
  source 1..40: mol_type = genomic DNA

SEQ ID NO: 56259 - DNA, 35 bp, Homo sapiens; identical to SEQ ID NO: 29170
  source 1..35: mol_type = genomic DNA

SEQ ID NO: 56260 - DNA, 23 bp, Homo sapiens
  source 1..23: mol_type = genomic DNA
tcagtcggtagagcatgagactc

SEQ ID NO: 56261 - DNA, 41 bp, Homo sapiens; identical to SEQ ID NO: 215
  source 1..41: mol_type = genomic DNA

SEQ ID NO: 56262 - DNA, 23 bp, Homo sapiens
  source 1..23: mol_type = genomic DNA
tgctaatggtggagttaaagact

SEQ ID NO: 56263 - DNA, 22 bp, Homo sapiens
  source 1..22: mol_type = genomic DNA
gaaagctcacaagaactgctaa

SEQ ID NO: 56264 - DNA, 23 bp, Homo sapiens
  source 1..23: mol_type = genomic DNA
aactcatgcccccatgtctaaca

SEQ ID NO: 56265 - DNA, 17 bp, Homo sapiens
  source 1..17: mol_type = genomic DNA
ggcctctttttaccacc

SEQ ID NO: 56266 - DNA, 20 bp, Homo sapiens
  source 1..20: mol_type = genomic DNA
gataatcatatttaccaacc

SEQ ID NO: 56267 - DNA, 30 bp, Homo sapiens; identical to SEQ ID NO: 8183
  source 1..30: mol_type = genomic DNA

SEQ ID NO: 56268 - DNA, 17 bp, Homo sapiens
  source 1..17: mol_type = genomic DNA
aatggtaagcactctgg

SEQ ID NO: 56269 - DNA, 35 bp, Homo sapiens; identical to SEQ ID NO: 27659
  source 1..35: mol_type = genomic DNA

SEQ ID NO: 56270 - DNA, 17 bp, Homo sapiens
  source 1..17: mol_type = genomic DNA
acccttcccgtactacc

SEQ ID NO: 56271 - DNA, 25 bp, Homo sapiens
  source 1..25: mol_type = genomic DNA
gaggcttacgaccccttatttaccc

SEQ ID NO: 56272 - DNA, 29 bp, Homo sapiens
  source 1..29: mol_type = genomic DNA
acagaggcttacgaccccttatttacccc

SEQ ID NO: 56273 - DNA, 37 bp, Homo sapiens; identical to SEQ ID NO: 24478
  source 1..37: mol_type = genomic DNA

SEQ ID NO: 56274 - DNA, 19 bp, Homo sapiens
  source 1..19: mol_type = genomic DNA
tcaaatcccggacgagccc

SEQ ID NO: 56275 - DNA, 24 bp, Homo sapiens
  source 1..24: mol_type = genomic DNA
tgggttcgattctcatagtcctag

SEQ ID NO: 56276 - DNA, 34 bp, Homo sapiens; identical to SEQ ID NO: 17431
  source 1..34: mol_type = genomic DNA

SEQ ID NO: 56277 - DNA, 38 bp, Homo sapiens; identical to SEQ ID NO: 19700
  source 1..38: mol_type = genomic DNA

SEQ ID NO: 56278 - DNA, 22 bp, Homo sapiens
  source 1..22: mol_type = genomic DNA
tcaattctcgctggggcctcca

SEQ ID NO: 56279 - DNA, 19 bp, Homo sapiens
  source 1..19: mol_type = genomic DNA
gtggttatcacgtctgctt

SEQ ID NO: 56280 - DNA, 26 bp, Homo sapiens
  source 1..26: mol_type = genomic DNA
cgccgctggtgtagtggtatcatgca

SEQ ID NO: 56281 - DNA, 27 bp, Homo sapiens
  source 1..27: mol_type = genomic DNA
ctgctaactcatgcccccatgtctaac

SEQ ID NO: 56282 - DNA, 16 bp, Homo sapiens
  source 1..16: mol_type = genomic DNA
atccggctcggaggac

SEQ ID NO: 56283 - DNA, 38 bp, Homo sapiens; identical to SEQ ID NO: 6216
  source 1..38: mol_type = genomic DNA

SEQ ID NO: 56284 - DNA, 27 bp, Homo sapiens
  source 1..27: mol_type = genomic DNA
gtaagttgcaatacttaatttctgcca

SEQ ID NO: 56285 - DNA, 23 bp, Homo sapiens
  source 1..23: mol_type = genomic DNA
gttcaattccccgacggggagcc

SEQ ID NO: 56286 - DNA, 19 bp, Homo sapiens
  source 1..19: mol_type = genomic DNA
taggcctctttttaccacc

SEQ ID NO: 56287 - DNA, 22 bp, Homo sapiens
  source 1..22: mol_type = genomic DNA
ggttcgactcctggctggctcg

SEQ ID NO: 56288 - DNA, 23 bp, Homo sapiens
  source 1..23: mol_type = genomic DNA
gttcgagccccagtggaaccacc

SEQ ID NO: 56289 - DNA, 25 bp, Homo sapiens
  source 1..25: mol_type = genomic DNA
ggttcgaatcccactcctgacacca

SEQ ID NO: 56290 - DNA, 16 bp, Homo sapiens
  source 1..16: mol_type = genomic DNA
ttcgactcccggtatg

SEQ ID NO: 56291 - DNA, 23 bp, Homo sapiens
  source 1..23: mol_type = genomic DNA
tggtgtagtggtatcatgcaaga

SEQ ID NO: 56292 - DNA, 19 bp, Homo sapiens
  source 1..19: mol_type = genomic DNA
ggttaggcctctttttacc

SEQ ID NO: 56293 - DNA, 25 bp, Homo sapiens
  source 1..25: mol_type = genomic DNA
cggtagagcatgggactcttaatcc

SEQ ID NO: 56294 - DNA, 28 bp, Homo sapiens
  source 1..28: mol_type = genomic DNA
gacaggggttaggcctctttttaccacc

SEQ ID NO: 56295 - DNA, 38 bp, Homo sapiens; identical to SEQ ID NO: 16645
  source 1..38: mol_type = genomic DNA

SEQ ID NO: 56296 - DNA, 17 bp, Homo sapiens
  source 1..17: mol_type = genomic DNA
taggatggggtgtgata

SEQ ID NO: 56297 - DNA, 20 bp, Homo sapiens
  source 1..20: mol_type = genomic DNA
cgattctcatagtcctagcc

SEQ ID NO: 56298 - DNA, 28 bp, Homo sapiens
  source 1..28: mol_type = genomic DNA
cgtagtgtagtggttatcacgttcgcct

SEQ ID NO: 56299 - DNA, 25 bp, Homo sapiens
  source 1..25: mol_type = genomic DNA
agccgtgatcgtatagtggttagta

SEQ ID NO: 56300 - DNA, 22 bp, Homo sapiens
  source 1..22: mol_type = genomic DNA
gttgatgcagagtggggttttg

SEQ ID NO: 56301 - DNA, 22 bp, Homo sapiens
  source 1..22: mol_type = genomic DNA
aagattaagagaaccaacacct

SEQ ID NO: 56302 - DNA, 41 bp, Homo sapiens; identical to SEQ ID NO: 16858
  source 1..41: mol_type = genomic DNA

SEQ ID NO: 56303 - DNA, 18 bp, Homo sapiens
  source 1..18: mol_type = genomic DNA
acacctctttacagtgac

SEQ ID NO: 56304 - DNA, 17 bp, Homo sapiens
  source 1..17: mol_type = genomic DNA
cttaggtcgctggttcg

SEQ ID NO: 56305 - DNA, 22 bp, Homo sapiens
  source 1..22: mol_type = genomic DNA
gacgggctcacatcaccccata

SEQ ID NO: 56306 - DNA, 38 bp, Homo sapiens; identical to SEQ ID NO: 24479
  source 1..38: mol_type = genomic DNA

SEQ ID NO: 56307 - DNA, 22 bp, Homo sapiens
  source 1..22: mol_type = genomic DNA
ttcgattccggctcgaaggacc

SEQ ID NO: 56308 - DNA, 20 bp, Homo sapiens
  source 1..20: mol_type = genomic DNA
catgggtggttcagtggtag

SEQ ID NO: 56309 - DNA, 34 bp, Homo sapiens; identical to SEQ ID NO: 19935
  source 1..34: mol_type = genomic DNA

SEQ ID NO: 56310 - DNA, 47 bp, Homo sapiens; identical to SEQ ID NO: 9935
  source 1..47: mol_type = genomic DNA

SEQ ID NO: 56311 - DNA, 19 bp, Homo sapiens
  source 1..19: mol_type = genomic DNA
gcggttatcacgtctgctt

SEQ ID NO: 56312 - DNA, 34 bp, Homo sapiens; identical to SEQ ID NO: 16563
  source 1..34: mol_type = genomic DNA

SEQ ID NO: 56313 - DNA, 21 bp, Homo sapiens
  source 1..21: mol_type = genomic DNA
tcgaatcacgtcggggtcacc

SEQ ID NO: 56314 - DNA, 20 bp, Homo sapiens
  source 1..20: mol_type = genomic DNA
cacaagaactgctaactcat

SEQ ID NO: 56315 - DNA, 35 bp, Homo sapiens; identical to SEQ ID NO: 20368
  source 1..35: mol_type = genomic DNA

SEQ ID NO: 56316 - DNA, 27 bp, Homo sapiens
  source 1..27: mol_type = genomic DNA
catggtgtaatggttagcactctggac

SEQ ID NO: 56317 - DNA, 29 bp, Homo sapiens
  source 1..29: mol_type = genomic DNA
ttttcatatcattggtcgtggttgtagtc

SEQ ID NO: 56318 - DNA, 25 bp, Homo sapiens
  source 1..25: mol_type = genomic DNA
ggttagcactctggactttgaatcc

SEQ ID NO: 56319 - DNA, 18 bp, Homo sapiens
  source 1..18: mol_type = genomic DNA
gttaactaagtgtttgtg

SEQ ID NO: 56320 - DNA, 23 bp, Homo sapiens
  source 1..23: mol_type = genomic DNA
gtagcgtggccgagcggtctaag

SEQ ID NO: 56321 - DNA, 26 bp, Homo sapiens
  source 1..26: mol_type = genomic DNA
aagaactgctaactcatgcccccatg

SEQ ID NO: 56322 - DNA, 25 bp, Homo sapiens
  source 1..25: mol_type = genomic DNA
gcccccatgtctaacaacatggctt

SEQ ID NO: 56323 - DNA, 17 bp, Homo sapiens
  source 1..17: mol_type = genomic DNA
caaagcaatacactgaa

SEQ ID NO: 56324 - DNA, 27 bp, Homo sapiens
  source 1..27: mol_type = genomic DNA
tccctggtggtctagtggctaggattc

SEQ ID NO: 56325 - DNA, 20 bp, Homo sapiens
  source 1..20: mol_type = genomic DNA
gatcgaaaccatcctctgct

SEQ ID NO: 56326 - DNA, 24 bp, Homo sapiens
  source 1..24: mol_type = genomic DNA
ggcttacgaccccttatttacccc

SEQ ID NO: 56327 - DNA, 19 bp, Homo sapiens
  source 1..19: mol_type = genomic DNA
gattccccgacggggagcc

SEQ ID NO: 56328 - DNA, 27 bp, Homo sapiens
  source 1..27: mol_type = genomic DNA
ttcatatcattggtcgtggttgtagtc

SEQ ID NO: 56329 - DNA, 17 bp, Homo sapiens
  source 1..17: mol_type = genomic DNA
ttcctcttcttaacacc

SEQ ID NO: 56330 - DNA, 34 bp, Homo sapiens; identical to SEQ ID NO: 9767
  source 1..34: mol_type = genomic DNA

SEQ ID NO: 56331 - DNA, 21 bp, Homo sapiens
  source 1..21: mol_type = genomic DNA
aacattcaaaaaagagtacca

SEQ ID NO: 56332 - DNA, 21 bp, Homo sapiens
  source 1..21: mol_type = genomic DNA
gttcgatcccgggtttcggca

SEQ ID NO: 56333 - DNA, 17 bp, Homo sapiens
  source 1..17: mol_type = genomic DNA
gagtgaagcattggact

SEQ ID NO: 56334 - DNA, 23 bp, Homo sapiens
  source 1..23: mol_type = genomic DNA
ttcgattctcatagtcctagcca

SEQ ID NO: 56335 - DNA, 27 bp, Homo sapiens
  source 1..27: mol_type = genomic DNA
tggtctagtggttaggattcggcgctc

SEQ ID NO: 56336 - DNA, 17 bp, Homo sapiens
  source 1..17: mol_type = genomic DNA
gtatgattctcggtttg

SEQ ID NO: 56337 - DNA, 30 bp, Homo sapiens; identical to SEQ ID NO: 16459
  source 1..30: mol_type = genomic DNA

SEQ ID NO: 56338 - DNA, 29 bp, Homo sapiens
  source 1..29: mol_type = genomic DNA
tcgtatagtggttagtactctgcgttgtg

SEQ ID NO: 56339 - DNA, 30 bp, Homo sapiens; identical to SEQ ID NO: 25843
  source 1..30: mol_type = genomic DNA

SEQ ID NO: 56340 - DNA, 34 bp, Homo sapiens; identical to SEQ ID NO: 16851
  source 1..34: mol_type = genomic DNA

SEQ ID NO: 56341 - DNA, 21 bp, Homo sapiens
  source 1..21: mol_type = genomic DNA
ttaagtcccattggtctagcc

SEQ ID NO: 56342 - DNA, 28 bp, Homo sapiens
  source 1..28: mol_type = genomic DNA
acatggtctagcggttaggattcctggt

SEQ ID NO: 56343 - DNA, 16 bp, Homo sapiens
  source 1..16: mol_type = genomic DNA
cgcgtggcctaatgga

SEQ ID NO: 56344 - DNA, 16 bp, Homo sapiens
  source 1..16: mol_type = genomic DNA
atcccggacgagcccc

SEQ ID NO: 56345 - DNA, 20 bp, Homo sapiens
  source 1..20: mol_type = genomic DNA
aaagacaggggttaggcctc

SEQ ID NO: 56346 - DNA, 18 bp, Homo sapiens
  source 1..18: mol_type = genomic DNA
ttccaagcagttgacccg

SEQ ID NO: 56347 - DNA, 17 bp, Homo sapiens
  source 1..17: mol_type = genomic DNA
gttcgattcccggtcag

SEQ ID NO: 56348 - DNA, 17 bp, Homo sapiens
  source 1..17: mol_type = genomic DNA
ccttcgatagctcagct

SEQ ID NO: 56349 - DNA, 16 bp, Homo sapiens
  source 1..16: mol_type = genomic DNA
attctcgcctgccacg

SEQ ID NO: 56350 - DNA, 18 bp, Homo sapiens
  source 1..18: mol_type = genomic DNA
tcaaacctgccggggctt

SEQ ID NO: 56351 - DNA, 34 bp, Homo sapiens; identical to SEQ ID NO: 6212
  source 1..34: mol_type = genomic DNA

SEQ ID NO: 56352 - DNA, 27 bp, Homo sapiens
  source 1..27: mol_type = genomic DNA
gttcttgtagttgaaatacaacgatgg

SEQ ID NO: 56353 - DNA, 21 bp, Homo sapiens
  source 1..21: mol_type = genomic DNA
gcgttggtggtatagtggtta

SEQ ID NO: 56354 - DNA, 24 bp, Homo sapiens
  source 1..24: mol_type = genomic DNA
agcagagtggcgcagcggaagcgt

SEQ ID NO: 56355 - DNA, 26 bp, Homo sapiens
  source 1..26: mol_type = genomic DNA
tccctggtggtctagtggctaggatt

SEQ ID NO: 56356 - DNA, 29 bp, Homo sapiens
  source 1..29: mol_type = genomic DNA
acatggtctagcggttaggattcctggtt

SEQ ID NO: 56357 - DNA, 23 bp, Homo sapiens
  source 1..23: mol_type = genomic DNA
attagggtgcttagctgttaact

SEQ ID NO: 56358 - DNA, 30 bp, Homo sapiens; identical to SEQ ID NO: 10904
  source 1..30: mol_type = genomic DNA

SEQ ID NO: 56359 - DNA, 26 bp, Homo sapiens
  source 1..26: mol_type = genomic DNA
cttttaagttaaagattaagagaacc

SEQ ID NO: 56360 - DNA, 23 bp, Homo sapiens
  source 1..23: mol_type = genomic DNA
caacttacacttaggagatttca

SEQ ID NO: 56361 - DNA, 20 bp, Homo sapiens
  source 1..20: mol_type = genomic DNA
gttaactaagtgtttgtggg

SEQ ID NO: 56362 - DNA, 35 bp, Homo sapiens; identical to SEQ ID NO: 16852
  source 1..35: mol_type = genomic DNA

SEQ ID NO: 56363 - DNA, 26 bp, Homo sapiens
  source 1..26: mol_type = genomic DNA
gttggttatacccttcccgtactacc

SEQ ID NO: 56364 - DNA, 24 bp, Homo sapiens
  source 1..24: mol_type = genomic DNA
ggttcaattccccgacggggagcc

SEQ ID NO: 56365 - DNA, 19 bp, Homo sapiens
  source 1..19: mol_type = genomic DNA
tcaaacctgccggggcttc

SEQ ID NO: 56366 - DNA, 17 bp, Homo sapiens
  source 1..17: mol_type = genomic DNA
cgtagtcgtggccgagt

SEQ ID NO: 56367 - DNA, 24 bp, Homo sapiens
  source 1..24: mol_type = genomic DNA
gttcgaatcccacttctgacacca

SEQ ID NO: 56368 - DNA, 18 bp, Homo sapiens
  source 1..18: mol_type = genomic DNA
gtctcttcgggggcgtgg

SEQ ID NO: 56369 - DNA, 23 bp, Homo sapiens
  source 1..23: mol_type = genomic DNA
gtcacggtggccgagtggttaag

SEQ ID NO: 56370 - DNA, 20 bp, Homo sapiens
  source 1..20: mol_type = genomic DNA
gctgagtgaagcattggact

SEQ ID NO: 56371 - DNA, 19 bp, Homo sapiens
  source 1..19: mol_type = genomic DNA
ggtggagttaaagactttt

SEQ ID NO: 56372 - DNA, 20 bp, Homo sapiens
  source 1..20: mol_type = genomic DNA
tggtgagtatccccgcctgt

SEQ ID NO: 56373 - DNA, 18 bp, Homo sapiens
  source 1..18: mol_type = genomic DNA
atagctcagtcggtagag

SEQ ID NO: 56374 - DNA, 28 bp, Homo sapiens
  source 1..28: mol_type = genomic DNA
acaggggttaggcctctttttaccacca

SEQ ID NO: 56375 - DNA, 26 bp, Homo sapiens
  source 1..26: mol_type = genomic DNA
gatgaaaacctttttccaaggacacc

SEQ ID NO: 56376 - DNA, 24 bp, Homo sapiens
  source 1..24: mol_type = genomic DNA
agcttaaacccccttatttctacc

SEQ ID NO: 56377 - DNA, 25 bp, Homo sapiens
  source 1..25: mol_type = genomic DNA
aaccaacacctctttacagtgacca

SEQ ID NO: 56378 - DNA, 30 bp, Homo sapiens; identical to SEQ ID NO: 12222
  source 1..30: mol_type = genomic DNA

SEQ ID NO: 56379 - DNA, 28 bp, Homo sapiens
  source 1..28: mol_type = genomic DNA
acttaggagatttcaacttaacttgacc

SEQ ID NO: 56380 - DNA, 23 bp, Homo sapiens
  source 1..23: mol_type = genomic DNA
agttgcaatacttaatttctgcc

SEQ ID NO: 56381 - DNA, 27 bp, Homo sapiens
  source 1..27: mol_type = genomic DNA
tggttagcactctggactttgaatcca

SEQ ID NO: 56382 - DNA, 19 bp, Homo sapiens
  source 1..19: mol_type = genomic DNA
gctagctcagtcggtagag

SEQ ID NO: 56383 - DNA, 28 bp, Homo sapiens
  source 1..28: mol_type = genomic DNA
gttagcactctggactctgaatccagcg

SEQ ID NO: 56384 - DNA, 18 bp, Homo sapiens
  source 1..18: mol_type = genomic DNA
gctatccattggtcttag

SEQ ID NO: 56385 - DNA, 23 bp, Homo sapiens
  source 1..23: mol_type = genomic DNA
gaccgcgtggcctaatggataag

SEQ ID NO: 56386 - DNA, 25 bp, Homo sapiens
  source 1..25: mol_type = genomic DNA
cggagatgaaaacctttttccaagg

SEQ ID NO: 56387 - DNA, 16 bp, Homo sapiens
  source 1..16: mol_type = genomic DNA
catggctttctcacca

SEQ ID NO: 56388 - DNA, 17 bp, Homo sapiens
  source 1..17: mol_type = genomic DNA
atagctcagtcggtaga

SEQ ID NO: 56389 - DNA, 20 bp, Homo sapiens
  source 1..20: mol_type = genomic DNA
cattggtggttcagtggtag

SEQ ID NO: 56390 - DNA, 16 bp, Homo sapiens
  source 1..16: mol_type = genomic DNA
gcccggctagctcagt

SEQ ID NO: 56391 - DNA, 28 bp, Homo sapiens
  source 1..28: mol_type = genomic DNA
atggttagcactctggactttgaatcca

SEQ ID NO: 56392 - DNA, 30 bp, Homo sapiens; identical to SEQ ID NO: 27917
  source 1..30: mol_type = genomic DNA

SEQ ID NO: 56393 - DNA, 23 bp, Homo sapiens
  source 1..23: mol_type = genomic DNA
gctcagtcggtagagcatcagac

SEQ ID NO: 56394 - DNA, 18 bp, Homo sapiens
  source 1..18: mol_type = genomic DNA
caggggttagagcactgg

SEQ ID NO: 56395 - DNA, 24 bp, Homo sapiens
  source 1..24: mol_type = genomic DNA
gttcaattccccgacggggagcca

SEQ ID NO: 56396 - DNA, 17 bp, Homo sapiens
  source 1..17: mol_type = genomic DNA
gttttgcagtccttacc

SEQ ID NO: 56397 - DNA, 34 bp, Homo sapiens; identical to SEQ ID NO: 16836
  source 1..34: mol_type = genomic DNA

SEQ ID NO: 56398 - DNA, 21 bp, Homo sapiens
  source 1..21: mol_type = genomic DNA
aagaactgctaactcatgccc

SEQ ID NO: 56399 - DNA, 22 bp, Homo sapiens
  source 1..22: mol_type = genomic DNA
caacttacacttaggagatttc

SEQ ID NO: 56400 - DNA, 16 bp, Homo sapiens
  source 1..16: mol_type = genomic DNA
cctctttttaccacca

SEQ ID NO: 56401 - DNA, 18 bp, Homo sapiens
  source 1..18: mol_type = genomic DNA
gatagctcagtcggtaga

SEQ ID NO: 56402 - DNA, 23 bp, Homo sapiens
  source 1..23: mol_type = genomic DNA
gttcgaatccggctcgaaggacc

SEQ ID NO: 56403 - DNA, 27 bp, Homo sapiens
  source 1..27: mol_type = genomic DNA
gctgagtgaagcattggactgtaaatc

SEQ ID NO: 56404 - DNA, 26 bp, Homo sapiens
  source 1..26: mol_type = genomic DNA
tggtctagcggttaggattcctggtt

SEQ ID NO: 56405 - DNA, 16 bp, Homo sapiens
  source 1..16: mol_type = genomic DNA
gttcgattccccgacg

SEQ ID NO: 56406 - DNA, 24 bp, Homo sapiens
  source 1..24: mol_type = genomic DNA
gttcgatcccgggtttcggcacca

SEQ ID NO: 56407 - DNA, 25 bp, Homo sapiens
  source 1..25: mol_type = genomic DNA
gtggtctagtggttaggattcggcg

SEQ ID NO: 56408 - DNA, 19 bp, Homo sapiens
  source 1..19: mol_type = genomic DNA
caaatctcggtggaacctc

SEQ ID NO: 56409 - DNA, 29 bp, Homo sapiens
  source 1..29: mol_type = genomic DNA
ttgtgggtttaagtcccattggtctagcc

SEQ ID NO: 56410 - DNA, 24 bp, Homo sapiens
  source 1..24: mol_type = genomic DNA
gttcgaatcctgccgactacgcca

SEQ ID NO: 56411 - DNA, 20 bp, Homo sapiens
  source 1..20: mol_type = genomic DNA
ccgaaaatgttggttatacc

SEQ ID NO: 56412 - DNA, 22 bp, Homo sapiens
  source 1..22: mol_type = genomic DNA
ttcaagtcacgtcggggtcacc

SEQ ID NO: 56413 - DNA, 19 bp, Homo sapiens
  source 1..19: mol_type = genomic DNA
gatagctcagtcggtagag

SEQ ID NO: 56414 - DNA, 28 bp, Homo sapiens
  source 1..28: mol_type = genomic DNA
gttcttgtagttgaaatacaacgatggt

SEQ ID NO: 56415 - DNA, 26 bp, Homo sapiens
  source 1..26: mol_type = genomic DNA
ctggactctgaatccagcgatccgag

SEQ ID NO: 56416 - DNA, 23 bp, Homo sapiens
  source 1..23: mol_type = genomic DNA
gtagtggttatcacgtctgcttt

SEQ ID NO: 56417 - DNA, 16 bp, Homo sapiens
  source 1..16: mol_type = genomic DNA
gtcaggatggccgagt

SEQ ID NO: 56418 - DNA, 24 bp, Homo sapiens
  source 1..24: mol_type = genomic DNA
agctcagtcggtagagcatgagac

SEQ ID NO: 56419 - DNA, 23 bp, Homo sapiens
  source 1..23: mol_type = genomic DNA
ggtaaaatggctgagtgaagcat

SEQ ID NO: 56420 - DNA, 32 bp, Homo sapiens; identical to SEQ ID NO: 16341
  source 1..32: mol_type = genomic DNA

SEQ ID NO: 56421 - DNA, 18 bp, Homo sapiens
  source 1..18: mol_type = genomic DNA
gctctcaccgccgcggcc

SEQ ID NO: 56422 - DNA, 24 bp, Homo sapiens
  source 1..24: mol_type = genomic DNA
gttcgagcccacccagggacgcca

SEQ ID NO: 56423 - DNA, 23 bp, Homo sapiens
  source 1..23: mol_type = genomic DNA
agtaaggtcagctaaataagcta

SEQ ID NO: 56424 - DNA, 28 bp, Homo sapiens
  source 1..28: mol_type = genomic DNA
aacatcagattgtgaatctgacaacaga

SEQ ID NO: 56425 - DNA, 17 bp, Homo sapiens
  source 1..17: mol_type = genomic DNA
cattcttgcgacccggg

SEQ ID NO: 56426 - DNA, 21 bp, Homo sapiens
  source 1..21: mol_type = genomic DNA
gttatacccttcccgtactac

SEQ ID NO: 56427 - DNA, 18 bp, Homo sapiens
  source 1..18: mol_type = genomic DNA
gttgtagtccgtgcgaga

SEQ ID NO: 56428 - DNA, 23 bp, Homo sapiens
  source 1..23: mol_type = genomic DNA
caagaactgctaactcatgcccc

SEQ ID NO: 56429 - DNA, 29 bp, Homo sapiens
  source 1..29: mol_type = genomic DNA
gcgttggtggtatagtggtaagcatagct

SEQ ID NO: 56430 - DNA, 20 bp, Homo sapiens
  source 1..20: mol_type = genomic DNA
gtggttatcacgtctgcttt

SEQ ID NO: 56431 - DNA, 31 bp, Homo sapiens; identical to SEQ ID NO: 6209
  source 1..31: mol_type = genomic DNA

SEQ ID NO: 56432 - DNA, 26 bp, Homo sapiens
  source 1..26: mol_type = genomic DNA
gtggttagtactctgcgttgtggccg

SEQ ID NO: 56433 - DNA, 27 bp, Homo sapiens
  source 1..27: mol_type = genomic DNA
gcataggtggttcagtggtagaattct

SEQ ID NO: 56434 - DNA, 22 bp, Homo sapiens
  source 1..22: mol_type = genomic DNA
ggttcaattccccgacggggag

SEQ ID NO: 56435 - DNA, 16 bp, Homo sapiens
  source 1..16: mol_type = genomic DNA
cccccttatttctacc

SEQ ID NO: 56436 - DNA, 18 bp, Homo sapiens
  source 1..18: mol_type = genomic DNA
gctagctcagtcggtaga

SEQ ID NO: 56437 - DNA, 20 bp, Homo sapiens
  source 1..20: mol_type = genomic DNA
tcttaatcccagggtcgtgg

SEQ ID NO: 56438 - DNA, 25 bp, Homo sapiens
  source 1..25: mol_type = genomic DNA
gaaagctcacaagaactgctaactc

SEQ ID NO: 56439 - DNA, 29 bp, Homo sapiens
  source 1..29: mol_type = genomic DNA
gacaggggttaggcctctttttaccacca

SEQ ID NO: 56440 - DNA, 29 bp, Homo sapiens
  source 1..29: mol_type = genomic DNA
ggctccgtggcgcaatggatagcgcattg

SEQ ID NO: 56441 - DNA, 17 bp, Homo sapiens
  source 1..17: mol_type = genomic DNA
cgaccccttatttaccc

SEQ ID NO: 56442 - DNA, 25 bp, Homo sapiens
  source 1..25: mol_type = genomic DNA
aggcttacgaccccttatttacccc

SEQ ID NO: 56443 - DNA, 20 bp, Homo sapiens
  source 1..20: mol_type = genomic DNA
taaacccccttatttctacc

SEQ ID NO: 56444 - DNA, 23 bp, Homo sapiens
  source 1..23: mol_type = genomic DNA
cagtcggtagagcatcagacttt

SEQ ID NO: 56445 - DNA, 26 bp, Homo sapiens
  source 1..26: mol_type = genomic DNA
ttggtctaggggtatgattctcgctt

SEQ ID NO: 56446 - DNA, 21 bp, Homo sapiens
  source 1..21: mol_type = genomic DNA
gcttcaaacctgccggggctt

SEQ ID NO: 56447 - DNA, 16 bp, Homo sapiens
  source 1..16: mol_type = genomic DNA
tcattggtcgtggttg

SEQ ID NO: 56448 - DNA, 24 bp, Homo sapiens
  source 1..24: mol_type = genomic DNA
ggagatgaaaacctttttccaagg

SEQ ID NO: 56449 - DNA, 24 bp, Homo sapiens
  source 1..24: mol_type = genomic DNA
gagaaccaacacctctttacagtg

SEQ ID NO: 56450 - DNA, 32 bp, Homo sapiens; identical to SEQ ID NO: 11010
  source 1..32: mol_type = genomic DNA

SEQ ID NO: 56451 - DNA, 20 bp, Homo sapiens
  source 1..20: mol_type = genomic DNA
cagttggtagagcatcagac

SEQ ID NO: 56452 - DNA, 24 bp, Homo sapiens
  source 1..24: mol_type = genomic DNA
gacaacattcaaaaaagagtacca

SEQ ID NO: 56453 - DNA, 26 bp, Homo sapiens
  source 1..26: mol_type = genomic DNA
atcgtatagtggttagtactctgcgt

SEQ ID NO: 56454 - DNA, 23 bp, Homo sapiens
  source 1..23: mol_type = genomic DNA
gggttaggcctctttttaccacc

SEQ ID NO: 56455 - DNA, 18 bp, Homo sapiens
  source 1..18: mol_type = genomic DNA
tacccttcccgtactacc

SEQ ID NO: 56456 - DNA, 28 bp, Homo sapiens
  source 1..28: mol_type = genomic DNA
tgtgggtttaagtcccattggtctagcc

SEQ ID NO: 56457 - DNA, 33 bp, Homo sapiens; identical to SEQ ID NO: 17430
  source 1..33: mol_type = genomic DNA

SEQ ID NO: 56458 - DNA, 24 bp, Homo sapiens
  source 1..24: mol_type = genomic DNA
ggttcgattctcatagtcctagcc

SEQ ID NO: 56459 - DNA, 20 bp, Homo sapiens
  source 1..20: mol_type = genomic DNA
gtagtccgtgcgagaatacc

SEQ ID NO: 56460 - DNA, 21 bp, Homo sapiens
  source 1..21: mol_type = genomic DNA
aagtgtttgtgggtttaagtc

SEQ ID NO: 56461 - DNA, 24 bp, Homo sapiens
  source 1..24: mol_type = genomic DNA
agttgcaatacttaatttctgcca

SEQ ID NO: 56462 - DNA, 24 bp, Homo sapiens
  source 1..24: mol_type = genomic DNA
gtctagcggttaggattcctggtt

SEQ ID NO: 56463 - DNA, 27 bp, Homo sapiens
  source 1..27: mol_type = genomic DNA
gctagctcagtcggtagagcatgagac

SEQ ID NO: 56464 - DNA, 23 bp, Homo sapiens
  source 1..23: mol_type = genomic DNA
agaactgctaactcatgccccca

SEQ ID NO: 56465 - DNA, 29 bp, Homo sapiens
  source 1..29: mol_type = genomic DNA
ggtggtctagtggttaggattcggcgctc

SEQ ID NO: 56466 - DNA, 36 bp, Homo sapiens; identical to SEQ ID NO: 7568
  source 1..36: mol_type = genomic DNA

SEQ ID NO: 56467 - DNA, 32 bp, Homo sapiens; identical to SEQ ID NO: 19933
  source 1..32: mol_type = genomic DNA

SEQ ID NO: 56468 - DNA, 35 bp, Homo sapiens; identical to SEQ ID NO: 16837
  source 1..35: mol_type = genomic DNA

SEQ ID NO: 56469 - DNA, 30 bp, Homo sapiens; identical to SEQ ID NO: 2272
  source 1..30: mol_type = genomic DNA

SEQ ID NO: 56470 - DNA, 17 bp, Homo sapiens
  source 1..17: mol_type = genomic DNA
tctcatagtcctagcca

SEQ ID NO: 56471 - DNA, 23 bp, Homo sapiens
  source 1..23: mol_type = genomic DNA
gtggggttttgcagtccttacca

SEQ ID NO: 56472 - DNA, 16 bp, Homo sapiens
  source 1..16: mol_type = genomic DNA
ggtatgattctcgctt

SEQ ID NO: 56473 - DNA, 20 bp, Homo sapiens
  source 1..20: mol_type = genomic DNA
ctgtcacgcgggagaccggg

SEQ ID NO: 56474 - DNA, 24 bp, Homo sapiens
  source 1..24: mol_type = genomic DNA
gaaaacctttttccaaggacacca

SEQ ID NO: 56475 - DNA, 19 bp, Homo sapiens
  source 1..19: mol_type = genomic DNA
aacccccttatttctacca

SEQ ID NO: 56476 - DNA, 24 bp, Homo sapiens
  source 1..24: mol_type = genomic DNA
gctcagtcggtagagcatgggact

SEQ ID NO: 56477 - DNA, 19 bp, Homo sapiens
  source 1..19: mol_type = genomic DNA
gttaactaagtgtttgtgg

SEQ ID NO: 56478 - DNA, 17 bp, Homo sapiens
  source 1..17: mol_type = genomic DNA
ctttttccaaggacacc

SEQ ID NO: 56479 - DNA, 18 bp, Homo sapiens
  source 1..18: mol_type = genomic DNA
gtcccatctgggtcgcca

SEQ ID NO: 56480 - DNA, 17 bp, Homo sapiens
  source 1..17: mol_type = genomic DNA
gttcgactcccggtgtg

SEQ ID NO: 56481 - DNA, 19 bp, Homo sapiens
  source 1..19: mol_type = genomic DNA
ttcaaacctgccggggctt

SEQ ID NO: 56482 - DNA, 31 bp, Homo sapiens; identical to SEQ ID NO: 9621
  source 1..31: mol_type = genomic DNA

SEQ ID NO: 56483 - DNA, 28 bp, Homo sapiens
  source 1..28: mol_type = genomic DNA
ccatggtgtaatggttagcactctggac

SEQ ID NO: 56484 - DNA, 24 bp, Homo sapiens
  source 1..24: mol_type = genomic DNA
gctttgcacgtatgaggccccggg

SEQ ID NO: 56485 - DNA, 19 bp, Homo sapiens
  source 1..19: mol_type = genomic DNA
caagaactgctaactcatg

SEQ ID NO: 56486 - DNA, 23 bp, Homo sapiens
  source 1..23: mol_type = genomic DNA
tgaagcattggactgtaaatcta

SEQ ID NO: 56487 - DNA, 20 bp, Homo sapiens
  source 1..20: mol_type = genomic DNA
tagcactctggactttgaat

SEQ ID NO: 56488 - DNA, 22 bp, Homo sapiens
  source 1..22: mol_type = genomic DNA
gttgcaatacttaatttctgcc

SEQ ID NO: 56489 - DNA, 28 bp, Homo sapiens
  source 1..28: mol_type = genomic DNA
aatacactgaaaatgtttagacgggctc

SEQ ID NO: 56490 - DNA, 17 bp, Homo sapiens
  source 1..17: mol_type = genomic DNA
gctctcaccgccgcggc

SEQ ID NO: 56491 - DNA, 33 bp, Homo sapiens; identical to SEQ ID NO: 27532
  source 1..33: mol_type = genomic DNA

SEQ ID NO: 56492 - DNA, 29 bp, Homo sapiens
  source 1..29: mol_type = genomic DNA
tgggtggttcagtggtagaattctcgcct

SEQ ID NO: 56493 - DNA, 18 bp, Homo sapiens
  source 1..18: mol_type = genomic DNA
actccaaataaaagtacc

SEQ ID NO: 56494 - DNA, 16 bp, Homo sapiens
  source 1..16: mol_type = genomic DNA
cggtagagcatgggac

SEQ ID NO: 56495 - DNA, 17 bp, Homo sapiens
  source 1..17: mol_type = genomic DNA
aagattaagagaaccaa

SEQ ID NO: 56496 - DNA, 21 bp, Homo sapiens
  source 1..21: mol_type = genomic DNA
catgggtggttcagtggtaga

SEQ ID NO: 56497 - DNA, 25 bp, Homo sapiens
  source 1..25: mol_type = genomic DNA
gtggttaggattcggcgctctcacc

SEQ ID NO: 56498 - DNA, 25 bp, Homo sapiens
  source 1..25: mol_type = genomic DNA
agtgtagtggttatcacgttcgcct

SEQ ID NO: 56499 - DNA, 18 bp, Homo sapiens
  source 1..18: mol_type = genomic DNA
attctcatagtcctagcc

SEQ ID NO: 56500 - DNA, 19 bp, Homo sapiens
  source 1..19: mol_type = genomic DNA
aacatcagattgtgaatct

SEQ ID NO: 56501 - DNA, 18 bp, Homo sapiens
  source 1..18: mol_type = genomic DNA
ggcctctttttaccacca

SEQ ID NO: 56502 - DNA, 20 bp, Homo sapiens
  source 1..20: mol_type = genomic DNA
gcggttatcacgtctgcttt

SEQ ID NO: 56503 - DNA, 19 bp, Homo sapiens
  source 1..19: mol_type = genomic DNA
gggatgtagctcagtggta

SEQ ID NO: 56504 - DNA, 17 bp, Homo sapiens
  source 1..17: mol_type = genomic DNA
tcctcgttagtatagtg

SEQ ID NO: 56505 - DNA, 17 bp, Homo sapiens
  source 1..17: mol_type = genomic DNA
cccagtggcctaatgga

SEQ ID NO: 56506 - DNA, 30 bp, Homo sapiens; identical to SEQ ID NO: 31052
  source 1..30: mol_type = genomic DNA

SEQ ID NO: 56507 - DNA, 36 bp, Homo sapiens; identical to SEQ ID NO: 31108
  source 1..36: mol_type = genomic DNA

SEQ ID NO: 56508 - DNA, 24 bp, Homo sapiens
  source 1..24: mol_type = genomic DNA
tgaaaacctttttccaaggacacc

SEQ ID NO: 56509 - DNA, 19 bp, Homo sapiens
  source 1..19: mol_type = genomic DNA
ttaggattcggcgctctca

SEQ ID NO: 56510 - DNA, 19 bp, Homo sapiens
  source 1..19: mol_type = genomic DNA
aacacctctttacagtgac

SEQ ID NO: 56511 - DNA, 33 bp, Homo sapiens; identical to SEQ ID NO: 14911
  source 1..33: mol_type = genomic DNA

SEQ ID NO: 56512 - DNA, 22 bp, Homo sapiens
  source 1..22: mol_type = genomic DNA
gagatgaaaacctttttccaag

SEQ ID NO: 56513 - DNA, 30 bp, Homo sapiens; identical to SEQ ID NO: 1152
  source 1..30: mol_type = genomic DNA

SEQ ID NO: 56514 - DNA, 16 bp, Homo sapiens
  source 1..16: mol_type = genomic DNA
aagattaagagaacca

SEQ ID NO: 56515 - DNA, 19 bp, Homo sapiens
  source 1..19: mol_type = genomic DNA
gattccttccttttttgcc

SEQ ID NO: 56516 - DNA, 22 bp, Homo sapiens
  source 1..22: mol_type = genomic DNA
cgtggttgtagtccgtgcgaga

SEQ ID NO: 56517 - DNA, 23 bp, Homo sapiens
  source 1..23: mol_type = genomic DNA
ggttaggcctctttttaccacca

SEQ ID NO: 56518 - DNA, 20 bp, Homo sapiens
  source 1..20: mol_type = genomic DNA
caatccccggcacctccacc

SEQ ID NO: 56519 - DNA, 36 bp, Homo sapiens; identical to SEQ ID NO: 11075
  source 1..36: mol_type = genomic DNA

SEQ ID NO: 56520 - DNA, 17 bp, Homo sapiens
  source 1..17: mol_type = genomic DNA
gggggtatagctcagtg

SEQ ID NO: 56521 - DNA, 21 bp, Homo sapiens
  source 1..21: mol_type = genomic DNA
agaaatatgtctgataaaaga

SEQ ID NO: 56522 - DNA, 27 bp, Homo sapiens
  source 1..27: mol_type = genomic DNA
agaaccaacacctctttacagtgacca

SEQ ID NO: 56523 - DNA, 32 bp, Homo sapiens; identical to SEQ ID NO: 10377
  source 1..32: mol_type = genomic DNA

SEQ ID NO: 56524 - DNA, 18 bp, Homo sapiens
  source 1..18: mol_type = genomic DNA
ctaggggtatgattctcg

SEQ ID NO: 56525 - DNA, 16 bp, Homo sapiens
  source 1..16: mol_type = genomic DNA
tcctgctcacagcgcc

SEQ ID NO: 56526 - DNA, 20 bp, Homo sapiens
  source 1..20: mol_type = genomic DNA
ttcaaacctgccggggcttc

SEQ ID NO: 56527 - DNA, 20 bp, Homo sapiens
  source 1..20: mol_type = genomic DNA
ttacgaccccttatttaccc

SEQ ID NO: 56528 - DNA, 36 bp, Homo sapiens; identical to SEQ ID NO: 10599
  source 1..36: mol_type = genomic DNA

SEQ ID NO: 56529 - DNA, 17 bp, Homo sapiens
  source 1..17: mol_type = genomic DNA
tatgattctcggtttgg

SEQ ID NO: 56530 - DNA, 19 bp, Homo sapiens
  source 1..19: mol_type = genomic DNA
ggttcaaatcccggacgag

SEQ ID NO: 56531 - DNA, 23 bp, Homo sapiens
  source 1..23: mol_type = genomic DNA
gtttaagtcccattggtctagcc

SEQ ID NO: 56532 - DNA, 36 bp, Homo sapiens; identical to SEQ ID NO: 30465
  source 1..36: mol_type = genomic DNA

SEQ ID NO: 56533 - DNA, 32 bp, Homo sapiens; identical to SEQ ID NO: 25532
  source 1..32: mol_type = genomic DNA

SEQ ID NO: 56534 - DNA, 16 bp, Homo sapiens
  source 1..16: mol_type = genomic DNA
ctagctcagtcggtag

SEQ ID NO: 56535 - DNA, 25 bp, Homo sapiens
  source 1..25: mol_type = genomic DNA
gctggtgtagtggtatcatgcaaga

SEQ ID NO: 56536 - DNA, 25 bp, Homo sapiens
  source 1..25: mol_type = genomic DNA
gtctaacaacatggctttctcacca

SEQ ID NO: 56537 - DNA, 24 bp, Homo sapiens
  source 1..24: mol_type = genomic DNA
gctcagtcggtagagcatgagact

SEQ ID NO: 56538 - DNA, 24 bp, Homo sapiens
  source 1..24: mol_type = genomic DNA
ggttcgattccttccttttttgcc

SEQ ID NO: 56539 - DNA, 26 bp, Homo sapiens
  source 1..26: mol_type = genomic DNA
gaggcttacgaccccttatttacccc

SEQ ID NO: 56540 - DNA, 36 bp, Homo sapiens; identical to SEQ ID NO: 11903
  source 1..36: mol_type = genomic DNA

SEQ ID NO: 56541 - DNA, 31 bp, Homo sapiens; identical to SEQ ID NO: 20364
  source 1..31: mol_type = genomic DNA

SEQ ID NO: 56542 - DNA, 19 bp, Homo sapiens
  source 1..19: mol_type = genomic DNA
aactccaaataaaagtacc

SEQ ID NO: 56543 - DNA, 28 bp, Homo sapiens
  source 1..28: mol_type = genomic DNA
tagctcagtcggtagagcatcagacttt

SEQ ID NO: 56544 - DNA, 20 bp, Homo sapiens
  source 1..20: mol_type = genomic DNA
tctagcggttaggattcctg

SEQ ID NO: 56545 - DNA, 32 bp, Homo sapiens; identical to SEQ ID NO: 25298
  source 1..32: mol_type = genomic DNA

SEQ ID NO: 56546 - DNA, 29 bp, Homo sapiens
  source 1..29: mol_type = genomic DNA
caggcggcccgggttcgactcccggtgtg

SEQ ID NO: 56547 - DNA, 30 bp, Homo sapiens; identical to SEQ ID NO: 6089
  source 1..30: mol_type = genomic DNA

SEQ ID NO: 56548 - DNA, 22 bp, Homo sapiens
  source 1..22: mol_type = genomic DNA
ttgcaatacttaatttctgcca

SEQ ID NO: 56549 - DNA, 32 bp, Homo sapiens; identical to SEQ ID NO: 19363
  source 1..32: mol_type = genomic DNA

SEQ ID NO: 56550 - DNA, 27 bp, Homo sapiens
  source 1..27: mol_type = genomic DNA
atggttagcactctggactttgaatcc

SEQ ID NO: 56551 - DNA, 26 bp, Homo sapiens
  source 1..26: mol_type = genomic DNA
aggcttacgaccccttatttacccca

SEQ ID NO: 56552 - DNA, 27 bp, Homo sapiens
  source 1..27: mol_type = genomic DNA
gcaatggtggttcagtggtagaattct

SEQ ID NO: 56553 - DNA, 31 bp, Homo sapiens; identical to SEQ ID NO: 23440
  source 1..31: mol_type = genomic DNA

SEQ ID NO: 56554 - DNA, 31 bp, Homo sapiens; identical to SEQ ID NO: 11097
  source 1..31: mol_type = genomic DNA

SEQ ID NO: 56555 - DNA, 17 bp, Homo sapiens
  source 1..17: mol_type = genomic DNA
taatggataaggcactg

SEQ ID NO: 56556 - DNA, 28 bp, Homo sapiens
  source 1..28: mol_type = genomic DNA
cccggctagctcagtcggtagagcatgg

SEQ ID NO: 56557 - DNA, 27 bp, Homo sapiens
  source 1..27: mol_type = genomic DNA
tgttggttatacccttcccgtactacc

SEQ ID NO: 56558 - DNA, 29 bp, Homo sapiens
  source 1..29: mol_type = genomic DNA
aatgttggttatacccttcccgtactacc

SEQ ID NO: 56559 - DNA, 28 bp, Homo sapiens
  source 1..28: mol_type = genomic DNA
atgttggttatacccttcccgtactacc

SEQ ID NO: 56560 - DNA, 27 bp, Homo sapiens
  source 1..27: mol_type = genomic DNA
tcgtggttgtagtccgtgcgagaatac

SEQ ID NO: 56561 - DNA, 21 bp, Homo sapiens
  source 1..21: mol_type = genomic DNA
caacattcaaaaaagagtacc

SEQ ID NO: 56562 - DNA, 23 bp, Homo sapiens
  source 1..23: mol_type = genomic DNA
gcgctctcaccgccgcggcccgg

SEQ ID NO: 56563 - DNA, 36 bp, Homo sapiens; identical to SEQ ID NO: 21408
  source 1..36: mol_type = genomic DNA

SEQ ID NO: 56564 - DNA, 24 bp, Homo sapiens
  source 1..24: mol_type = genomic DNA
gtttatgtagcttacctcctcaaa

SEQ ID NO: 56565 - DNA, 17 bp, Homo sapiens
  source 1..17: mol_type = genomic DNA
cagttgacccgggttcg

SEQ ID NO: 56566 - DNA, 36 bp, Homo sapiens; identical to SEQ ID NO: 29297
  source 1..36: mol_type = genomic DNA

SEQ ID NO: 56567 - DNA, 18 bp, Homo sapiens
  source 1..18: mol_type = genomic DNA
gtcaggatggccgagtgg

SEQ ID NO: 56568 - DNA, 24 bp, Homo sapiens
  source 1..24: mol_type = genomic DNA
ggttccatagtgtagtggttatca

SEQ ID NO: 56569 - DNA, 22 bp, Homo sapiens
  source 1..22: mol_type = genomic DNA
ttcgattccccgacggggagcc

SEQ ID NO: 56570 - DNA, 21 bp, Homo sapiens
  source 1..21: mol_type = genomic DNA
agattgtgaatctgacaacag

SEQ ID NO: 56571 - DNA, 26 bp, Homo sapiens
  source 1..26: mol_type = genomic DNA
ggtctagtggttaggattcggcgctc

SEQ ID NO: 56572 - DNA, 17 bp, Homo sapiens
  source 1..17: mol_type = genomic DNA
ttcaaaaaagagtacca

SEQ ID NO: 56573 - DNA, 23 bp, Homo sapiens
  source 1..23: mol_type = genomic DNA
gttcgattccttccttttttgcc

SEQ ID NO: 56574 - DNA, 36 bp, Homo sapiens; identical to SEQ ID NO: 10674
  source 1..36: mol_type = genomic DNA

SEQ ID NO: 56575 - DNA, 33 bp, Homo sapiens; identical to SEQ ID NO: 20366
  source 1..33: mol_type = genomic DNA

SEQ ID NO: 56576 - DNA, 19 bp, Homo sapiens
  source 1..19: mol_type = genomic DNA
atacccttcccgtactacc

SEQ ID NO: 56577 - DNA, 23 bp, Homo sapiens
  source 1..23: mol_type = genomic DNA
gttcgattctcatagtcctagcc

SEQ ID NO: 56578 - DNA, 20 bp, Homo sapiens
  source 1..20: mol_type = genomic DNA
gattcggcgctctcaccgcc

SEQ ID NO: 56579 - DNA, 20 bp, Homo sapiens
  source 1..20: mol_type = genomic DNA
tcaaatcccggacgagcccc

SEQ ID NO: 56580 - DNA, 16 bp, Homo sapiens
  source 1..16: mol_type = genomic DNA
gttcttgtagttgaaa

SEQ ID NO: 56581 - DNA, 22 bp, Homo sapiens
  source 1..22: mol_type = genomic DNA
cagattgtgaatctgacaacag

SEQ ID NO: 56582 - DNA, 26 bp, Homo sapiens
  source 1..26: mol_type = genomic DNA
tggtagaattctcgcctgccacgcgg

SEQ ID NO: 56583 - DNA, 34 bp, Homo sapiens; identical to SEQ ID NO: 20367
  source 1..34: mol_type = genomic DNA

SEQ ID NO: 56584 - DNA, 32 bp, Homo sapiens; identical to SEQ ID NO: 20185
  source 1..32: mol_type = genomic DNA

SEQ ID NO: 56585 - DNA, 16 bp, Homo sapiens
  source 1..16: mol_type = genomic DNA
tcaaatcccggacgag

SEQ ID NO: 56586 - DNA, 36 bp, Homo sapiens; identical to SEQ ID NO: 19548
  source 1..36: mol_type = genomic DNA

SEQ ID NO: 56587 - DNA, 16 bp, Homo sapiens
  source 1..16: mol_type = genomic DNA
gtgtgaggtcccgggt

SEQ ID NO: 56588 - DNA, 36 bp, Homo sapiens; identical to SEQ ID NO: 21176
  source 1..36: mol_type = genomic DNA

SEQ ID NO: 56589 - DNA, 20 bp, Homo sapiens
  source 1..20: mol_type = genomic DNA
caacacctctttacagtgac

SEQ ID NO: 56590 - DNA, 17 bp, Homo sapiens
  source 1..17: mol_type = genomic DNA
tcctatatatcttacca

SEQ ID NO: 56591 - DNA, 36 bp, Homo sapiens; identical to SEQ ID NO: 22459
  source 1..36: mol_type = genomic DNA

SEQ ID NO: 56592 - DNA, 28 bp, Homo sapiens
  source 1..28: mol_type = genomic DNA
tggtagaattctcgcctgccacgcggga

SEQ ID NO: 56593 - DNA, 27 bp, Homo sapiens
  source 1..27: mol_type = genomic DNA
gagaaccaacacctctttacagtgacc

SEQ ID NO: 56594 - DNA, 23 bp, Homo sapiens
  source 1..23: mol_type = genomic DNA
ctagtggttaggattcggcgctc

SEQ ID NO: 56595 - DNA, 22 bp, Homo sapiens
  source 1..22: mol_type = genomic DNA
aaacctttttccaaggacacca

SEQ ID NO: 56596 - DNA, 28 bp, Homo sapiens
  source 1..28: mol_type = genomic DNA
gtggttaggattcggcgctctcaccgcc

SEQ ID NO: 56597 - DNA, 23 bp, Homo sapiens
  source 1..23: mol_type = genomic DNA
gctcagtcggtagagcatgggac

SEQ ID NO: 56598 - DNA, 29 bp, Homo sapiens
  source 1..29: mol_type = genomic DNA
gagtgaagcattggactgtaaatctaaag

SEQ ID NO: 56599 - DNA, 17 bp, Homo sapiens
  source 1..17: mol_type = genomic DNA
ctccaaataaaagtacc

SEQ ID NO: 56600 - DNA, 17 bp, Homo sapiens
  source 1..17: mol_type = genomic DNA
gtagtcgtggccgagtg

SEQ ID NO: 56601 - DNA, 23 bp, Homo sapiens
  source 1..23: mol_type = genomic DNA
taagccagggattgtgggttcga

SEQ ID NO: 56602 - DNA, 36 bp, Homo sapiens; identical to SEQ ID NO: 7401
  source 1..36: mol_type = genomic DNA

SEQ ID NO: 56603 - DNA, 36 bp, Homo sapiens; identical to SEQ ID NO: 26853
  source 1..36: mol_type = genomic DNA

SEQ ID NO: 56604 - DNA, 26 bp, Homo sapiens
  source 1..26: mol_type = genomic DNA
gagaaccaacacctctttacagtgac

SEQ ID NO: 56605 - DNA, 36 bp, Homo sapiens; identical to SEQ ID NO: 30350
  source 1..36: mol_type = genomic DNA

SEQ ID NO: 56606 - DNA, 30 bp, Homo sapiens; identical to SEQ ID NO: 2849
  source 1..30: mol_type = genomic DNA

SEQ ID NO: 56607 - DNA, 32 bp, Homo sapiens; identical to SEQ ID NO: 2851
  source 1..32: mol_type = genomic DNA

SEQ ID NO: 56608 - DNA, 17 bp, Homo sapiens
  source 1..17: mol_type = genomic DNA
gtcacgtcggggtcacc

SEQ ID NO: 56609 - DNA, 16 bp, Homo sapiens
  source 1..16: mol_type = genomic DNA
accccttatttacccc

SEQ ID NO: 56610 - DNA, 32 bp, Homo sapiens; identical to SEQ ID NO: 6210
  source 1..32: mol_type = genomic DNA

SEQ ID NO: 56611 - DNA, 22 bp, Homo sapiens
  source 1..22: mol_type = genomic DNA
ttaaccgaaaggttggtggttc

SEQ ID NO: 56612 - DNA, 16 bp, Homo sapiens
  source 1..16: mol_type = genomic DNA
ccgtgcgagaatacca

SEQ ID NO: 56613 - DNA, 16 bp, Homo sapiens
  source 1..16: mol_type = genomic DNA
tccctgtggtctagtg

SEQ ID NO: 56614 - DNA, 36 bp, Homo sapiens; identical to SEQ ID NO: 8272
  source 1..36: mol_type = genomic DNA

SEQ ID NO: 56615 - DNA, 27 bp, Homo sapiens
  source 1..27: mol_type = genomic DNA
tcggtagagcatgggactcttaatccc

SEQ ID NO: 56616 - DNA, 29 bp, Homo sapiens
  source 1..29: mol_type = genomic DNA
tagctcagtcggtagagcatcagactttt

SEQ ID NO: 56617 - DNA, 24 bp, Homo sapiens
  source 1..24: mol_type = genomic DNA
gttcgaatcccaccgctgccacca

SEQ ID NO: 56618 - DNA, 21 bp, Homo sapiens
  source 1..21: mol_type = genomic DNA
ttaaacccccttatttctacc

SEQ ID NO: 56619 - DNA, 29 bp, Homo sapiens
  source 1..29: mol_type = genomic DNA
cggctagctcagtcggtagagcatgagac

SEQ ID NO: 56620 - DNA, 28 bp, Homo sapiens
  source 1..28: mol_type = genomic DNA
atcattggtcgtggttgtagtccgtgcg

SEQ ID NO: 56621 - DNA, 20 bp, Homo sapiens
  source 1..20: mol_type = genomic DNA
cgctctcaccgccgcggccc

SEQ ID NO: 56622 - DNA, 28 bp, Homo sapiens
  source 1..28: mol_type = genomic DNA
atcgtatagtggttagtactctgcgttg

SEQ ID NO: 56623 - DNA, 25 bp, Homo sapiens
  source 1..25: mol_type = genomic DNA
gtgtagtggttatcacgttcgcctc

SEQ ID NO: 56624 - DNA, 33 bp, Homo sapiens; identical to SEQ ID NO: 2980
  source 1..33: mol_type = genomic DNA

SEQ ID NO: 56625 - DNA, 25 bp, Homo sapiens
  source 1..25: mol_type = genomic DNA
gtagcgtggccgagcggtctaaggc

SEQ ID NO: 56626 - DNA, 22 bp, Homo sapiens
  source 1..22: mol_type = genomic DNA
tcgtggttgtagtccgtgcgag

SEQ ID NO: 56627 - DNA, 29 bp, Homo sapiens
  source 1..29: mol_type = genomic DNA
tctggactctgaatccagcgatccgagtt

SEQ ID NO: 56628 - DNA, 32 bp, Homo sapiens; identical to SEQ ID NO: 132
  source 1..32: mol_type = genomic DNA

SEQ ID NO: 56629 - DNA, 36 bp, Homo sapiens; identical to SEQ ID NO: 3484
  source 1..36: mol_type = genomic DNA

SEQ ID NO: 56630 - DNA, 17 bp, Homo sapiens
  source 1..17: mol_type = genomic DNA
ggttaggattcctggtt

SEQ ID NO: 56631 - DNA, 28 bp, Homo sapiens
  source 1..28: mol_type = genomic DNA
gtcgtggttgtagtccgtgcgagaatac

SEQ ID NO: 56632 - DNA, 18 bp, Homo sapiens
  source 1..18: mol_type = genomic DNA
aaaatgtttagacgggct

SEQ ID NO: 56633 - DNA, 30 bp, Homo sapiens; identical to SEQ ID NO: 4232
  source 1..30: mol_type = genomic DNA

SEQ ID NO: 56634 - DNA, 17 bp, Homo sapiens
  source 1..17: mol_type = genomic DNA
ctcccggtgtgggaacc

SEQ ID NO: 56635 - DNA, 19 bp, Homo sapiens
  source 1..19: mol_type = genomic DNA
acacctctttacagtgacc

SEQ ID NO: 56636 - DNA, 24 bp, Homo sapiens
  source 1..24: mol_type = genomic DNA
cgtggttgtagtccgtgcgagaat

SEQ ID NO: 56637 - DNA, 23 bp, Homo sapiens
  source 1..23: mol_type = genomic DNA
cagtcggtagagcatgggactct

SEQ ID NO: 56638 - DNA, 20 bp, Homo sapiens
  source 1..20: mol_type = genomic DNA
gtggttatcacgttcgcctc

SEQ ID NO: 56639 - DNA, 17 bp, Homo sapiens
  source 1..17: mol_type = genomic DNA
gtcggtagagcatggga

SEQ ID NO: 56640 - DNA, 32 bp, Homo sapiens; identical to SEQ ID NO: 21797
  source 1..32: mol_type = genomic DNA

SEQ ID NO: 56641 - DNA, 21 bp, Homo sapiens
  source 1..21: mol_type = genomic DNA
agtgaagcattggactgtaaa

SEQ ID NO: 56642 - DNA, 24 bp, Homo sapiens
  source 1..24: mol_type = genomic DNA
gttcgattccttccttttttgcca

SEQ ID NO: 56643 - DNA, 20 bp, Homo sapiens
  source 1..20: mol_type = genomic DNA
gaagcattggactgtaaatc

SEQ ID NO: 56644 - DNA, 30 bp, Homo sapiens; identical to SEQ ID NO: 18425
  source 1..30: mol_type = genomic DNA

SEQ ID NO: 56645 - DNA, 25 bp, Homo sapiens
  source 1..25: mol_type = genomic DNA
tggtagaattctcgcctgccacgcg

SEQ ID NO: 56646 - DNA, 23 bp, Homo sapiens
  source 1..23: mol_type = genomic DNA
ccggatagctcagtcggtagagc

SEQ ID NO: 56647 - DNA, 22 bp, Homo sapiens
  source 1..22: mol_type = genomic DNA
ttggtggttcagtggtagaatt

SEQ ID NO: 56648 - DNA, 31 bp, Homo sapiens; identical to SEQ ID NO: 24472
  source 1..31: mol_type = genomic DNA

SEQ ID NO: 56649 - DNA, 17 bp, Homo sapiens
  source 1..17: mol_type = genomic DNA
ctagctcagtcggtaga

SEQ ID NO: 56650 - DNA, 22 bp, Homo sapiens
  source 1..22: mol_type = genomic DNA
tgggtttaagtcccattggtct

SEQ ID NO: 56651 - DNA, 33 bp, Homo sapiens; identical to SEQ ID NO: 13256
  source 1..33: mol_type = genomic DNA

SEQ ID NO: 56652 - DNA, 17 bp, Homo sapiens
  source 1..17: mol_type = genomic DNA
gaaaaagtcatggaggc

SEQ ID NO: 56653 - DNA, 30 bp, Homo sapiens; identical to SEQ ID NO: 10495
  source 1..30: mol_type = genomic DNA

SEQ ID NO: 56654 - DNA, 17 bp, Homo sapiens
  source 1..17: mol_type = genomic DNA
ggtcccatggtgtaatg

SEQ ID NO: 56655 - DNA, 17 bp, Homo sapiens
  source 1..17: mol_type = genomic DNA
aaccgggcagaagcacc

SEQ ID NO: 56656 - DNA, 33 bp, Homo sapiens; identical to SEQ ID NO: 19757
  source 1..33: mol_type = genomic DNA

SEQ ID NO: 56657 - DNA, 30 bp, Homo sapiens; identical to SEQ ID NO: 7068
  source 1..30: mol_type = genomic DNA

SEQ ID NO: 56658 - DNA, 29 bp, Homo sapiens
  source 1..29: mol_type = genomic DNA
agtggttaggattcggcgctctcaccgcc

SEQ ID NO: 56659 - DNA, 17 bp, Homo sapiens
  source 1..17: mol_type = genomic DNA
gaccccttatttacccc

SEQ ID NO: 56660 - DNA, 36 bp, Homo sapiens; identical to SEQ ID NO: 21757
  source 1..36: mol_type = genomic DNA

SEQ ID NO: 56661 - DNA, 23 bp, Homo sapiens
  source 1..23: mol_type = genomic DNA
gttcgagccccacgttgggcgcc

SEQ ID NO: 56662 - DNA, 36 bp, Homo sapiens; identical to SEQ ID NO: 29577
  source 1..36: mol_type = genomic DNA

SEQ ID NO: 56663 - DNA, 32 bp, Homo sapiens; identical to SEQ ID NO: 12411
  source 1..32: mol_type = genomic DNA

SEQ ID NO: 56664 - DNA, 26 bp, Homo sapiens
  source 1..26: mol_type = genomic DNA
ggagcttaaacccccttatttctacc

SEQ ID NO: 56665 - DNA, 36 bp, Homo sapiens; identical to SEQ ID NO: 4154
  source 1..36: mol_type = genomic DNA

SEQ ID NO: 56666 - DNA, 33 bp, Homo sapiens; identical to SEQ ID NO: 22474
  source 1..33: mol_type = genomic DNA

SEQ ID NO: 56667 - DNA, 25 bp, Homo sapiens
  source 1..25: mol_type = genomic DNA
ttcggcgctctcaccgccgcggccc

SEQ ID NO: 56668 - DNA, 20 bp, Homo sapiens
  source 1..20: mol_type = genomic DNA
gcgttggtggtatagtggta

SEQ ID NO: 56669 - DNA, 32 bp, Homo sapiens; identical to SEQ ID NO: 23441
  source 1..32: mol_type = genomic DNA

SEQ ID NO: 56670 - DNA, 33 bp, Homo sapiens; identical to SEQ ID NO: 27920
  source 1..33: mol_type = genomic DNA

SEQ ID NO: 56671 - DNA, 30 bp, Homo sapiens; identical to SEQ ID NO: 7979
  source 1..30: mol_type = genomic DNA

SEQ ID NO: 56672 - DNA, 23 bp, Homo sapiens
  source 1..23: mol_type = genomic DNA
gtgaagcattggactgtaaatct

SEQ ID NO: 56673 - DNA, 31 bp, Homo sapiens; identical to SEQ ID NO: 9764
  source 1..31: mol_type = genomic DNA

SEQ ID NO: 56674 - DNA, 32 bp, Homo sapiens; identical to SEQ ID NO: 6406
  source 1..32: mol_type = genomic DNA

SEQ ID NO: 56675 - DNA, 31 bp, Homo sapiens; identical to SEQ ID NO: 6405
  source 1..31: mol_type = genomic DNA

SEQ ID NO: 56676 - DNA, 33 bp, Homo sapiens; identical to SEQ ID NO: 6211
  source 1..33: mol_type = genomic DNA

SEQ ID NO: 56677 - DNA, 25 bp, Homo sapiens
  source 1..25: mol_type = genomic DNA
gttaggattcggcgctctcaccgcc

SEQ ID NO: 56678 - DNA, 27 bp, Homo sapiens
  source 1..27: mol_type = genomic DNA
gattcggcgctctcaccgccgcggccc

SEQ ID NO: 56679 - DNA, 36 bp, Homo sapiens; identical to SEQ ID NO: 6410
  source 1..36: mol_type = genomic DNA

SEQ ID NO: 56680 - DNA, 33 bp, Homo sapiens; identical to SEQ ID NO: 24474
  source 1..33: mol_type = genomic DNA

SEQ ID NO: 56681 - DNA, 21 bp, Homo sapiens
  source 1..21: mol_type = genomic DNA
ggattcggcgctctcaccgcc

SEQ ID NO: 56682 - DNA, 26 bp, Homo sapiens
  source 1..26: mol_type = genomic DNA
attcggcgctctcaccgccgcggccc

SEQ ID NO: 56683 - DNA, 31 bp, Homo sapiens; identical to SEQ ID NO: 30378
  source 1..31: mol_type = genomic DNA

SEQ ID NO: 56684 - DNA, 29 bp, Homo sapiens
  source 1..29: mol_type = genomic DNA
ggctagctcagtcggtagagcatgggact

SEQ ID NO: 56685 - DNA, 36 bp, Homo sapiens; identical to SEQ ID NO: 14589
  source 1..36: mol_type = genomic DNA

SEQ ID NO: 56686 - DNA, 30 bp, Homo sapiens; identical to SEQ ID NO: 7529
  source 1..30: mol_type = genomic DNA

SEQ ID NO: 56687 - DNA, 25 bp, Homo sapiens
  source 1..25: mol_type = genomic DNA
gtcgtggttgtagtccgtgcgagaa

SEQ ID NO: 56688 - DNA, 18 bp, Homo sapiens
  source 1..18: mol_type = genomic DNA
tcgtggttgtagtccgtg

SEQ ID NO: 56689 - DNA, 27 bp, Homo sapiens
  source 1..27: mol_type = genomic DNA
ggagcttaaacccccttatttctacca

SEQ ID NO: 56690 - DNA, 30 bp, Homo sapiens; identical to SEQ ID NO: 31181
  source 1..30: mol_type = genomic DNA

SEQ ID NO: 56691 - DNA, 23 bp, Homo sapiens
  source 1..23: mol_type = genomic DNA
gttagcactctggactttgaatc

SEQ ID NO: 56692 - DNA, 30 bp, Homo sapiens; identical to SEQ ID NO: 25831
  source 1..30: mol_type = genomic DNA

SEQ ID NO: 56693 - DNA, 32 bp, Homo sapiens; identical to SEQ ID NO: 25478
  source 1..32: mol_type = genomic DNA

SEQ ID NO: 56694 - DNA, 31 bp, Homo sapiens; identical to SEQ ID NO: 2233
  source 1..31: mol_type = genomic DNA

SEQ ID NO: 56695 - DNA, 36 bp, Homo sapiens; identical to SEQ ID NO: 20369
  source 1..36: mol_type = genomic DNA

SEQ ID NO: 56696 - DNA, 33 bp, Homo sapiens; identical to SEQ ID NO: 24042
  source 1..33: mol_type = genomic DNA

SEQ ID NO: 56697 - DNA, 30 bp, Homo sapiens; identical to SEQ ID NO: 9763
  source 1..30: mol_type = genomic DNA

SEQ ID NO: 56698 - DNA, 16 bp, Homo sapiens
  source 1..16: mol_type = genomic DNA
tggttaggattcggcg

SEQ ID NO: 56699 - DNA, 32 bp, Homo sapiens; identical to SEQ ID NO: 30379
  source 1..32: mol_type = genomic DNA

SEQ ID NO: 56700 - DNA, 28 bp, Homo sapiens
  source 1..28: mol_type = genomic DNA
gctagctcagtcggtagagcatgggact

SEQ ID NO: 56701 - DNA, 27 bp, Homo sapiens
  source 1..27: mol_type = genomic DNA
ggtcgtggttgtagtccgtgcgagaat

SEQ ID NO: 56702 - DNA, 21 bp, Homo sapiens
  source 1..21: mol_type = genomic DNA
cgagtcctgccgcggtcgcca

SEQ ID NO: 56703 - DNA, 30 bp, Homo sapiens; identical to SEQ ID NO: 10129
  source 1..30: mol_type = genomic DNA

SEQ ID NO: 56704 - DNA, 21 bp, Homo sapiens
  source 1..21: mol_type = genomic DNA
gtttccgtagtgtagtggtca

SEQ ID NO: 56705 - DNA, 33 bp, Homo sapiens; identical to SEQ ID NO: 25533
  source 1..33: mol_type = genomic DNA

SEQ ID NO: 56706 - DNA, 30 bp, Homo sapiens; identical to SEQ ID NO: 24039
  source 1..30: mol_type = genomic DNA

SEQ ID NO: 56707 - DNA, 32 bp, Homo sapiens; identical to SEQ ID NO: 16849
  source 1..32: mol_type = genomic DNA

SEQ ID NO: 56708 - DNA, 30 bp, Homo sapiens; identical to SEQ ID NO: 16253
  source 1..30: mol_type = genomic DNA

SEQ ID NO: 56709 - DNA, 33 bp, Homo sapiens; identical to SEQ ID NO: 25479
  source 1..33: mol_type = genomic DNA

SEQ ID NO: 56710 - DNA, 32 bp, Homo sapiens; identical to SEQ ID NO: 16804
  source 1..32: mol_type = genomic DNA

SEQ ID NO: 56711 - DNA, 32 bp, Homo sapiens; identical to SEQ ID NO: 16829
  source 1..32: mol_type = genomic DNA

SEQ ID NO: 56712 - DNA, 24 bp, Homo sapiens
  source 1..24: mol_type = genomic DNA
ataacagctatccattggtcttag

SEQ ID NO: 56713 - DNA, 22 bp, Homo sapiens
  source 1..22: mol_type = genomic DNA
ccttccaagcagttgacccggg

SEQ ID NO: 56714 - DNA, 20 bp, Homo sapiens
  source 1..20: mol_type = genomic DNA
taggggtatgattctcgctt

SEQ ID NO: 56715 - DNA, 23 bp, Homo sapiens
  source 1..23: mol_type = genomic DNA
cgtggttgtagtccgtgcgagaa

SEQ ID NO: 56716 - DNA, 29 bp, Homo sapiens
  source 1..29: mol_type = genomic DNA
cggatagctcagtcggtagagcatcagac

SEQ ID NO: 56717 - DNA, 17 bp, Homo sapiens
  source 1..17: mol_type = genomic DNA
aaccgggcggaaacacc

SEQ ID NO: 56718 - DNA, 24 bp, Homo sapiens
  source 1..24: mol_type = genomic DNA
gggttaggcctctttttaccacca

SEQ ID NO: 56719 - DNA, 19 bp, Homo sapiens
  source 1..19: mol_type = genomic DNA
aattaactagttttgacaa

SEQ ID NO: 56720 - DNA, 22 bp, Homo sapiens
  source 1..22: mol_type = genomic DNA
gttaggattcggcgctctcacc

SEQ ID NO: 56721 - DNA, 23 bp, Homo sapiens
  source 1..23: mol_type = genomic DNA
gtgtagtggttatcacgttcgcc

SEQ ID NO: 56722 - DNA, 16 bp, Homo sapiens
  source 1..16: mol_type = genomic DNA
tctcggtgggacctcc

SEQ ID NO: 56723 - DNA, 17 bp, Homo sapiens
  source 1..17: mol_type = genomic DNA
ttcccgggcggcgcacc

SEQ ID NO: 56724 - DNA, 18 bp, Homo sapiens
  source 1..18: mol_type = genomic DNA
tcccgggcggaaacacca

SEQ ID NO: 56725 - DNA, 22 bp, Homo sapiens
  source 1..22: mol_type = genomic DNA
agtggtagaattctcgcctgcc

SEQ ID NO: 56726 - DNA, 23 bp, Homo sapiens
  source 1..23: mol_type = genomic DNA
ctcgcctgccacgcgggaggccc

SEQ ID NO: 56727 - DNA, 19 bp, Homo sapiens
  source 1..19: mol_type = genomic DNA
ggttcgattcccggtcagg

SEQ ID NO: 56728 - DNA, 17 bp, Homo sapiens
  source 1..17: mol_type = genomic DNA
acctctttacagtgacc

SEQ ID NO: 56729 - DNA, 25 bp, Homo sapiens
  source 1..25: mol_type = genomic DNA
gagcttaaacccccttatttctacc

SEQ ID NO: 56730 - DNA, 30 bp, Homo sapiens; identical to SEQ ID NO: 12504
  source 1..30: mol_type = genomic DNA

SEQ ID NO: 56731 - DNA, 28 bp, Homo sapiens
  source 1..28: mol_type = genomic DNA
gcaatggtggttcagtggtagaattctc

SEQ ID NO: 56732 - DNA, 29 bp, Homo sapiens
  source 1..29: mol_type = genomic DNA
ttggtggttcagtggtagaattctcgcct

SEQ ID NO: 56733 - DNA, 18 bp, Homo sapiens
  source 1..18: mol_type = genomic DNA
atcctatatatcttacca

SEQ ID NO: 56734 - DNA, 21 bp, Homo sapiens
  source 1..21: mol_type = genomic DNA
gggggtatagctcagtggtag

SEQ ID NO: 56735 - DNA, 29 bp, Homo sapiens
  source 1..29: mol_type = genomic DNA
gtccttgtagtataaactaatacaccagt

SEQ ID NO: 56736 - DNA, 27 bp, Homo sapiens
  source 1..27: mol_type = genomic DNA
gcactggtggttcagtggtagaattct

SEQ ID NO: 56737 - DNA, 21 bp, Homo sapiens
  source 1..21: mol_type = genomic DNA
tagcggttaggattcctggtt

SEQ ID NO: 56738 - DNA, 17 bp, Homo sapiens
  source 1..17: mol_type = genomic DNA
ccgcgtggcctaatgga

SEQ ID NO: 56739 - DNA, 24 bp, Homo sapiens
  source 1..24: mol_type = genomic DNA
agctcagtcggtagagcatcagac

SEQ ID NO: 56740 - DNA, 21 bp, Homo sapiens
  source 1..21: mol_type = genomic DNA
taaacccccttatttctacca

SEQ ID NO: 56741 - DNA, 25 bp, Homo sapiens
  source 1..25: mol_type = genomic DNA
ggttcgagtcccggcggagtcgcca

SEQ ID NO: 56742 - DNA, 20 bp, Homo sapiens
  source 1..20: mol_type = genomic DNA
aacaacatggctttctcacc

SEQ ID NO: 56743 - DNA, 24 bp, Homo sapiens
  source 1..24: mol_type = genomic DNA
tcagtcggtagagcatgggactct

SEQ ID NO: 56744 - DNA, 23 bp, Homo sapiens
  source 1..23: mol_type = genomic DNA
gtaatggtgagcactctggactc

SEQ ID NO: 56745 - DNA, 20 bp, Homo sapiens
  source 1..20: mol_type = genomic DNA
aggggtagagcatttgactg

SEQ ID NO: 56746 - DNA, 21 bp, Homo sapiens
  source 1..21: mol_type = genomic DNA
ggttaggattcggcgctctca

SEQ ID NO: 56747 - DNA, 17 bp, Homo sapiens
  source 1..17: mol_type = genomic DNA
ggttccatagtgtagtg

SEQ ID NO: 56748 - DNA, 16 bp, Homo sapiens
  source 1..16: mol_type = genomic DNA
cagtcggtagagcatg

SEQ ID NO: 56749 - DNA, 16 bp, Homo sapiens
  source 1..16: mol_type = genomic DNA
cctctttacagtgacc

SEQ ID NO: 56750 - DNA, 19 bp, Homo sapiens
  source 1..19: mol_type = genomic DNA
tcgaatcccatcctcgtcg

SEQ ID NO: 56751 - DNA, 29 bp, Homo sapiens
  source 1..29: mol_type = genomic DNA
ggagatgaaaacctttttccaaggacacc

SEQ ID NO: 56752 - DNA, 26 bp, Homo sapiens
  source 1..26: mol_type = genomic DNA
gtggagttaaagactttttctctgac

SEQ ID NO: 56753 - DNA, 20 bp, Homo sapiens
  source 1..20: mol_type = genomic DNA
gcaatacttaatttctgcca

SEQ ID NO: 56754 - DNA, 21 bp, Homo sapiens
  source 1..21: mol_type = genomic DNA
gctcacaagaactgctaactc

SEQ ID NO: 56755 - DNA, 29 bp, Homo sapiens
  source 1..29: mol_type = genomic DNA
gtttccgtagtgtagcggttatcacattc

SEQ ID NO: 56756 - DNA, 29 bp, Homo sapiens
  source 1..29: mol_type = genomic DNA
gcccccatgtctaacaacatggctttctc

SEQ ID NO: 56757 - DNA, 17 bp, Homo sapiens
  source 1..17: mol_type = genomic DNA
atcacgtcggggtcacc

SEQ ID NO: 56758 - DNA, 21 bp, Homo sapiens
  source 1..21: mol_type = genomic DNA
gttaggcctctttttaccacc

SEQ ID NO: 56759 - DNA, 23 bp, Homo sapiens
  source 1..23: mol_type = genomic DNA
gtggttaggattcggcgctctca

SEQ ID NO: 56760 - DNA, 22 bp, Homo sapiens
  source 1..22: mol_type = genomic DNA
tagtactctgcgttgtggccgc

SEQ ID NO: 56761 - DNA, 17 bp, Homo sapiens
  source 1..17: mol_type = genomic DNA
gttcttgtagttgaaat

SEQ ID NO: 56762 - DNA, 24 bp, Homo sapiens
  source 1..24: mol_type = genomic DNA
ggctcacatcaccccataaacacc

SEQ ID NO: 56763 - DNA, 30 bp, Homo sapiens; identical to SEQ ID NO: 13916
  source 1..30: mol_type = genomic DNA

SEQ ID NO: 56764 - DNA, 24 bp, Homo sapiens
  source 1..24: mol_type = genomic DNA
ggagttaaagactttttctctgac

SEQ ID NO: 56765 - DNA, 22 bp, Homo sapiens
  source 1..22: mol_type = genomic DNA
ctagcggttaggattcctggtt

SEQ ID NO: 56766 - DNA, 23 bp, Homo sapiens
  source 1..23: mol_type = genomic DNA
gtatagtggttagtactctgcgt

SEQ ID NO: 56767 - DNA, 28 bp, Homo sapiens
  source 1..28: mol_type = genomic DNA
ggtggagttaaagactttttctctgacc

SEQ ID NO: 56768 - DNA, 26 bp, Homo sapiens
  source 1..26: mol_type = genomic DNA
tggtctagtggttaggattcggcgct

SEQ ID NO: 56769 - DNA, 27 bp, Homo sapiens
  source 1..27: mol_type = genomic DNA
tcattggtcgtggttgtagtccgtgcg

SEQ ID NO: 56770 - DNA, 24 bp, Homo sapiens
  source 1..24: mol_type = genomic DNA
gcccccatgtctaacaacatggct

SEQ ID NO: 56771 - DNA, 29 bp, Homo sapiens
  source 1..29: mol_type = genomic DNA
ggttccatagtgtagcggttatcacgtct

SEQ ID NO: 56772 - DNA, 30 bp, Homo sapiens; identical to SEQ ID NO: 22220
  source 1..30: mol_type = genomic DNA

SEQ ID NO: 56773 - DNA, 18 bp, Homo sapiens
  source 1..18: mol_type = genomic DNA
cgtggttgtagtccgtgc

SEQ ID NO: 56774 - DNA, 23 bp, Homo sapiens
  source 1..23: mol_type = genomic DNA
gcttaaacccccttatttctacc

SEQ ID NO: 56775 - DNA, 18 bp, Homo sapiens
  source 1..18: mol_type = genomic DNA
gtccctgtccaggcgcca

SEQ ID NO: 56776 - DNA, 28 bp, Homo sapiens
  source 1..28: mol_type = genomic DNA
tgccgtgatcgtatagtggttagtactc

SEQ ID NO: 56777 - DNA, 20 bp, Homo sapiens
  source 1..20: mol_type = genomic DNA
tatacccttcccgtactacc

SEQ ID NO: 56778 - DNA, 16 bp, Homo sapiens
  source 1..16: mol_type = genomic DNA
gaaaaagtcatggagg

SEQ ID NO: 56779 - DNA, 23 bp, Homo sapiens
  source 1..23: mol_type = genomic DNA
gttgcaatacttaatttctgcca

SEQ ID NO: 56780 - DNA, 19 bp, Homo sapiens
  source 1..19: mol_type = genomic DNA
cccataacccagaggtcga

SEQ ID NO: 56781 - DNA, 26 bp, Homo sapiens
  source 1..26: mol_type = genomic DNA
caggggttaggcctctttttaccacc

SEQ ID NO: 56782 - DNA, 27 bp, Homo sapiens
  source 1..27: mol_type = genomic DNA
gaggcttacgaccccttatttacccca

SEQ ID NO: 56783 - DNA, 21 bp, Homo sapiens
  source 1..21: mol_type = genomic DNA
cgatgcccgcatcctccacca

SEQ ID NO: 56784 - DNA, 22 bp, Homo sapiens
  source 1..22: mol_type = genomic DNA
ggttccatagtgtagtggttat

SEQ ID NO: 56785 - DNA, 22 bp, Homo sapiens
  source 1..22: mol_type = genomic DNA
gggggattagctcaaatggtag

SEQ ID NO: 56786 - DNA, 24 bp, Homo sapiens
  source 1..24: mol_type = genomic DNA
gtttccgtagtgtagtggtcatca

SEQ ID NO: 56787 - DNA, 19 bp, Homo sapiens
  source 1..19: mol_type = genomic DNA
attctcatagtcctagcca

SEQ ID NO: 56788 - DNA, 21 bp, Homo sapiens
  source 1..21: mol_type = genomic DNA
gacgaggtggccgagtggtta

SEQ ID NO: 56789 - DNA, 30 bp, Homo sapiens; identical to SEQ ID NO: 12521
  source 1..30: mol_type = genomic DNA

SEQ ID NO: 56790 - DNA, 26 bp, Homo sapiens
  source 1..26: mol_type = genomic DNA
ttaggagatttcaacttaacttgacc

SEQ ID NO: 56791 - DNA, 25 bp, Homo sapiens
  source 1..25: mol_type = genomic DNA
gtatagtggttagtactctgcgttg

SEQ ID NO: 56792 - DNA, 18 bp, Homo sapiens
  source 1..18: mol_type = genomic DNA
ctcccggtgtgggaacca

SEQ ID NO: 56793 - DNA, 16 bp, Homo sapiens
  source 1..16: mol_type = genomic DNA
ctcatagtcctagcca

SEQ ID NO: 56794 - DNA, 30 bp, Homo sapiens; identical to SEQ ID NO: 10275
  source 1..30: mol_type = genomic DNA

SEQ ID NO: 56795 - DNA, 23 bp, Homo sapiens
  source 1..23: mol_type = genomic DNA
tccctggtggtctagtggctagg

SEQ ID NO: 56796 - DNA, 22 bp, Homo sapiens
  source 1..22: mol_type = genomic DNA
gtttgtgggtttaagtcccatt

SEQ ID NO: 56797 - DNA, 28 bp, Homo sapiens
  source 1..28: mol_type = genomic DNA
gtgatcgtatagtggttagtactctgcg

SEQ ID NO: 56798 - DNA, 24 bp, Homo sapiens
  source 1..24: mol_type = genomic DNA
ggttatacccttcccgtactacca

SEQ ID NO: 56799 - DNA, 21 bp, Homo sapiens
  source 1..21: mol_type = genomic DNA
ttatacccttcccgtactacc

SEQ ID NO: 56800 - DNA, 23 bp, Homo sapiens
  source 1..23: mol_type = genomic DNA
ggccccatggtgtaatggttagc

SEQ ID NO: 56801 - DNA, 28 bp, Homo sapiens
  source 1..28: mol_type = genomic DNA
aaaatggctgagtgaagcattggactgt

SEQ ID NO: 56802 - DNA, 21 bp, Homo sapiens
  source 1..21: mol_type = genomic DNA
gtagtcgtggccgagtggtta

SEQ ID NO: 56803 - DNA, 21 bp, Homo sapiens
  source 1..21: mol_type = genomic DNA
aacaacatggctttctcacca

SEQ ID NO: 56804 - DNA, 22 bp, Homo sapiens
  source 1..22: mol_type = genomic DNA
caacattcaaaaaagagtacca

SEQ ID NO: 56805 - DNA, 20 bp, Homo sapiens
  source 1..20: mol_type = genomic DNA
gggggtatagctcagtggta

SEQ ID NO: 56806 - DNA, 23 bp, Homo sapiens
  source 1..23: mol_type = genomic DNA
ctctggactctgaatccagcgat

SEQ ID NO: 56807 - DNA, 18 bp, Homo sapiens
  source 1..18: mol_type = genomic DNA
ttctcgctggggcctcca

SEQ ID NO: 56808 - DNA, 21 bp, Homo sapiens
  source 1..21: mol_type = genomic DNA
tctagcggttaggattcctgg

SEQ ID NO: 56809 - DNA, 30 bp, Homo sapiens; identical to SEQ ID NO: 2232
  source 1..30: mol_type = genomic DNA

SEQ ID NO: 56810 - DNA, 25 bp, Homo sapiens
  source 1..25: mol_type = genomic DNA
atttcaacttaacttgaccgctctg

SEQ ID NO: 56811 - DNA, 18 bp, Homo sapiens
  source 1..18: mol_type = genomic DNA
gcttctgtagtgtagtgg

SEQ ID NO: 56812 - DNA, 26 bp, Homo sapiens
  source 1..26: mol_type = genomic DNA
gagtgaagcattggactgtaaatcta

SEQ ID NO: 56813 - DNA, 27 bp, Homo sapiens
  source 1..27: mol_type = genomic DNA
cgtggttgtagtccgtgcgagaatacc

SEQ ID NO: 56814 - DNA, 21 bp, Homo sapiens
  source 1..21: mol_type = genomic DNA
cgattctcatagtcctagcca

SEQ ID NO: 56815 - DNA, 24 bp, Homo sapiens
  source 1..24: mol_type = genomic DNA
atcattggtcgtggttgtagtccg

SEQ ID NO: 56816 - DNA, 22 bp, Homo sapiens
  source 1..22: mol_type = genomic DNA
tggtctagtggttaggattcgg

SEQ ID NO: 56817 - DNA, 23 bp, Homo sapiens
  source 1..23: mol_type = genomic DNA
gggggtatagctcagtggtagag

SEQ ID NO: 56818 - DNA, 23 bp, Homo sapiens
  source 1..23: mol_type = genomic DNA
gtggttgtagtccgtgcgagaat

SEQ ID NO: 56819 - DNA, 26 bp, Homo sapiens
  source 1..26: mol_type = genomic DNA
gagatttcaacttaacttgaccgctc

SEQ ID NO: 56820 - DNA, 18 bp, Homo sapiens
  source 1..18: mol_type = genomic DNA
ggttttgcagtccttacc

SEQ ID NO: 56821 - DNA, 20 bp, Homo sapiens
  source 1..20: mol_type = genomic DNA
tacgaccccttatttacccc

SEQ ID NO: 56822 - DNA, 30 bp, Homo sapiens; identical to SEQ ID NO: 7138
  source 1..30: mol_type = genomic DNA

SEQ ID NO: 56823 - DNA, 21 bp, Homo sapiens
  source 1..21: mol_type = genomic DNA
atagtggttagtactctgcgt

SEQ ID NO: 56824 - DNA, 24 bp, Homo sapiens
  source 1..24: mol_type = genomic DNA
tcagtcggtagagcatcagacttt

SEQ ID NO: 56825 - DNA, 19 bp, Homo sapiens
  source 1..19: mol_type = genomic DNA
ggccctatagctcaggggt

SEQ ID NO: 56826 - DNA, 21 bp, Homo sapiens
  source 1..21: mol_type = genomic DNA
gggggattagctcaaatggta

SEQ ID NO: 56827 - DNA, 19 bp, Homo sapiens
  source 1..19: mol_type = genomic DNA
gggttttgcagtccttacc

SEQ ID NO: 56828 - DNA, 23 bp, Homo sapiens
  source 1..23: mol_type = genomic DNA
ggttatacccttcccgtactacc

SEQ ID NO: 56829 - DNA, 20 bp, Homo sapiens
  source 1..20: mol_type = genomic DNA
agtaaggtcagctaaataag

SEQ ID NO: 56830 - DNA, 24 bp, Homo sapiens
  source 1..24: mol_type = genomic DNA
ggtgtaatggttagcactctggac

SEQ ID NO: 56831 - DNA, 19 bp, Homo sapiens
  source 1..19: mol_type = genomic DNA
ttaaagactttttctctga

SEQ ID NO: 56832 - DNA, 24 bp, Homo sapiens
  source 1..24: mol_type = genomic DNA
ctagcggttaggattcctggtttt

SEQ ID NO: 56833 - DNA, 25 bp, Homo sapiens
  source 1..25: mol_type = genomic DNA
ttggttatacccttcccgtactacc

SEQ ID NO: 56834 - DNA, 22 bp, Homo sapiens
  source 1..22: mol_type = genomic DNA
ttagtactctgcgttgtggccg

SEQ ID NO: 56835 - DNA, 28 bp, Homo sapiens
  source 1..28: mol_type = genomic DNA
gcgttggtggtatagtggtaagcatagc

SEQ ID NO: 56836 - DNA, 29 bp, Homo sapiens
  source 1..29: mol_type = genomic DNA
agcagagtggcgcagcggaagcgtgctgg

SEQ ID NO: 56837 - DNA, 27 bp, Homo sapiens
  source 1..27: mol_type = genomic DNA
gctggtgtagtggtatcatgcaagatt

SEQ ID NO: 56838 - DNA, 22 bp, Homo sapiens
  source 1..22: mol_type = genomic DNA
gagttaaagactttttctctga

SEQ ID NO: 56839 - DNA, 19 bp, Homo sapiens
  source 1..19: mol_type = genomic DNA
gttcgattccccgacgggg

SEQ ID NO: 56840 - DNA, 21 bp, Homo sapiens
  source 1..21: mol_type = genomic DNA
caacacctctttacagtgacc

SEQ ID NO: 56841 - DNA, 21 bp, Homo sapiens
  source 1..21: mol_type = genomic DNA
tggttaggattcggcgctctc

SEQ ID NO: 56842 - DNA, 18 bp, Homo sapiens
  source 1..18: mol_type = genomic DNA
cgaccccttatttacccc

SEQ ID NO: 56843 - DNA, 23 bp, Homo sapiens
  source 1..23: mol_type = genomic DNA
ttagtactctgcgttgtggccgc

SEQ ID NO: 56844 - DNA, 21 bp, Homo sapiens
  source 1..21: mol_type = genomic DNA
tcgaatccggctcgaaggacc

SEQ ID NO: 56845 - DNA, 18 bp, Homo sapiens
  source 1..18: mol_type = genomic DNA
gttcttgtagttgaaata

SEQ ID NO: 56846 - DNA, 22 bp, Homo sapiens
  source 1..22: mol_type = genomic DNA
aacatcagattgtgaatctgac

SEQ ID NO: 56847 - DNA, 22 bp, Homo sapiens
  source 1..22: mol_type = genomic DNA
gtggttgtagtccgtgcgagaa

SEQ ID NO: 56848 - DNA, 16 bp, Homo sapiens
  source 1..16: mol_type = genomic DNA
ggttccatagtgtagt

SEQ ID NO: 56849 - DNA, 25 bp, Homo sapiens
  source 1..25: mol_type = genomic DNA
gcgccgctggtgtagtggtatcatg

SEQ ID NO: 56850 - DNA, 16 bp, Homo sapiens
  source 1..16: mol_type = genomic DNA
cccgggtttcggcacc

SEQ ID NO: 56851 - DNA, 19 bp, Homo sapiens
  source 1..19: mol_type = genomic DNA
gcggttaggattcctggtt

SEQ ID NO: 56852 - DNA, 28 bp, Homo sapiens
  source 1..28: mol_type = genomic DNA
tcgtggttgtagtccgtgcgagaatacc

SEQ ID NO: 56853 - DNA, 27 bp, Homo sapiens
  source 1..27: mol_type = genomic DNA
tggttaggattcggcgctctcaccgcc

SEQ ID NO: 56854 - DNA, 18 bp, Homo sapiens
  source 1..18: mol_type = genomic DNA
gccgcgtggcctaatgga

SEQ ID NO: 56855 - DNA, 22 bp, Homo sapiens
  source 1..22: mol_type = genomic DNA
gttatacccttcccgtactacc

SEQ ID NO: 56856 - DNA, 22 bp, Homo sapiens
  source 1..22: mol_type = genomic DNA
gcgttggtggtatagtggttag

SEQ ID NO: 56857 - DNA, 27 bp, Homo sapiens
  source 1..27: mol_type = genomic DNA
ggtggagttaaagactttttctctgac

SEQ ID NO: 56858 - DNA, 24 bp, Homo sapiens
  source 1..24: mol_type = genomic DNA
gttcgattctcatagtcctagcca

SEQ ID NO: 56859 - DNA, 20 bp, Homo sapiens
  source 1..20: mol_type = genomic DNA
ggtaaaatggctgagtgaag

SEQ ID NO: 56860 - DNA, 20 bp, Homo sapiens
  source 1..20: mol_type = genomic DNA
aacacctctttacagtgacc

SEQ ID NO: 56861 - DNA, 16 bp, Homo sapiens
  source 1..16: mol_type = genomic DNA
gcatgggtggttcagt

SEQ ID NO: 56862 - DNA, 19 bp, Homo sapiens
  source 1..19: mol_type = genomic DNA
tcgtggttgtagtccgtgc

SEQ ID NO: 56863 - DNA, 19 bp, Homo sapiens
  source 1..19: mol_type = genomic DNA
aaaatgtttagacgggctc

SEQ ID NO: 56864 - DNA, 18 bp, Homo sapiens
  source 1..18: mol_type = genomic DNA
agtaaggtcagctaaata

SEQ ID NO: 56865 - DNA, 24 bp, Homo sapiens
  source 1..24: mol_type = genomic DNA
gttcgagccccacgttgggcgcca

SEQ ID NO: 56866 - DNA, 28 bp, Homo sapiens
  source 1..28: mol_type = genomic DNA
gagatttcaacttaacttgaccgctctg

SEQ ID NO: 56867 - DNA, 21 bp, Homo sapiens
  source 1..21: mol_type = genomic DNA
ttacgaccccttatttacccc

SEQ ID NO: 56868 - DNA, 20 bp, Homo sapiens
  source 1..20: mol_type = genomic DNA
taatggttagcactctggac

SEQ ID NO: 56869 - DNA, 21 bp, Homo sapiens
  source 1..21: mol_type = genomic DNA
tcgaatccgagtcacggcacc

SEQ ID NO: 56870 - DNA, 18 bp, Homo sapiens
  source 1..18: mol_type = genomic DNA
aaccgggcggaaacacca

SEQ ID NO: 56871 - DNA, 27 bp, Homo sapiens
  source 1..27: mol_type = genomic DNA
caggggttaggcctctttttaccacca

SEQ ID NO: 56872 - DNA, 19 bp, Homo sapiens
  source 1..19: mol_type = genomic DNA
atccccagtacctccacca

SEQ ID NO: 56873 - DNA, 29 bp, Homo sapiens
  source 1..29: mol_type = genomic DNA
tgccgtgatcgtatagtggttagtactct

SEQ ID NO: 56874 - DNA, 18 bp, Homo sapiens
  source 1..18: mol_type = genomic DNA
aacatggctttctcacca

SEQ ID NO: 56875 - DNA, 18 bp, Homo sapiens
  source 1..18: mol_type = genomic DNA
cagattgtgaatctgaca

SEQ ID NO: 56876 - DNA, 29 bp, Homo sapiens
  source 1..29: mol_type = genomic DNA
gattgtgaatctgacaacagaggcttacg

SEQ ID NO: 56877 - DNA, 25 bp, Homo sapiens
  source 1..25: mol_type = genomic DNA
tgccgtgatcgtatagtggttagta

SEQ ID NO: 56878 - DNA, 20 bp, Homo sapiens
  source 1..20: mol_type = genomic DNA
gtggttgtagtccgtgcgag

SEQ ID NO: 56879 - DNA, 19 bp, Homo sapiens
  source 1..19: mol_type = genomic DNA
atcattggtcgtggttgta

SEQ ID NO: 56880 - DNA, 22 bp, Homo sapiens
  source 1..22: mol_type = genomic DNA
gttcttgtagttgaaatacaac

SEQ ID NO: 56881 - DNA, 25 bp, Homo sapiens
  source 1..25: mol_type = genomic DNA
tggttgtagtccgtgcgagaatacc

SEQ ID NO: 56882 - DNA, 30 bp, Homo sapiens; identical to SEQ ID NO: 17317
  source 1..30: mol_type = genomic DNA

SEQ ID NO: 56883 - DNA, 29 bp, Homo sapiens
  source 1..29: mol_type = genomic DNA
gcgttggtggtatagtggtgagcatagct

SEQ ID NO: 56884 - DNA, 29 bp, Homo sapiens
  source 1..29: mol_type = genomic DNA
ggtcgtggttgtagtccgtgcgagaatac

SEQ ID NO: 56885 - DNA, 22 bp, Homo sapiens
  source 1..22: mol_type = genomic DNA
gttaggcctctttttaccacca

SEQ ID NO: 56886 - DNA, 29 bp, Homo sapiens
  source 1..29: mol_type = genomic DNA
taaccaaaacatcagattgtgaatctgac

SEQ ID NO: 56887 - DNA, 28 bp, Homo sapiens
  source 1..28: mol_type = genomic DNA
gagaaccaacacctctttacagtgacca

SEQ ID NO: 56888 - DNA, 28 bp, Homo sapiens
  source 1..28: mol_type = genomic DNA
gccgtgatcgtatagtggttagtactct

SEQ ID NO: 56889 - DNA, 22 bp, Homo sapiens
  source 1..22: mol_type = genomic DNA
gacctcgtggcgcaatggtagc

SEQ ID NO: 56890 - DNA, 30 bp, Homo sapiens; identical to SEQ ID NO: 6995
  source 1..30: mol_type = genomic DNA

SEQ ID NO: 56891 - DNA, 20 bp, Homo sapiens
  source 1..20: mol_type = genomic DNA
gttcttgtagttgaaataca

SEQ ID NO: 56892 - DNA, 23 bp, Homo sapiens
  source 1..23: mol_type = genomic DNA
gtgtaatggttagcactctggac

SEQ ID NO: 56893 - DNA, 21 bp, Homo sapiens
  source 1..21: mol_type = genomic DNA
gttcgattcccggtcagggaa

SEQ ID NO: 56894 - DNA, 21 bp, Homo sapiens
  source 1..21: mol_type = genomic DNA
tcagtcggtagagcatgagac

SEQ ID NO: 56895 - DNA, 26 bp, Homo sapiens
  source 1..26: mol_type = genomic DNA
aacatcagattgtgaatctgacaaca

SEQ ID NO: 56896 - DNA, 24 bp, Homo sapiens
  source 1..24: mol_type = genomic DNA
gcgttggtggtatagtggttagca

SEQ ID NO: 56897 - DNA, 28 bp, Homo sapiens
  source 1..28: mol_type = genomic DNA
cattggtcgtggttgtagtccgtgcgag

SEQ ID NO: 56898 - DNA, 22 bp, Homo sapiens
  source 1..22: mol_type = genomic DNA
caacacctctttacagtgacca

SEQ ID NO: 56899 - DNA, 21 bp, Homo sapiens
  source 1..21: mol_type = genomic DNA
agtaaggtcagctaaataagc

SEQ ID NO: 56900 - DNA, 18 bp, Homo sapiens
  source 1..18: mol_type = genomic DNA
gtggtatcatgcaagatt

SEQ ID NO: 56901 - DNA, 28 bp, Homo sapiens
  source 1..28: mol_type = genomic DNA
gtttccgtagtgtagcggttatcacatt

SEQ ID NO: 56902 - DNA, 20 bp, Homo sapiens
  source 1..20: mol_type = genomic DNA
ggtcgtggttgtagtccgtg

SEQ ID NO: 56903 - DNA, 22 bp, Homo sapiens
  source 1..22: mol_type = genomic DNA
tagtggttaggattcggcgctc

SEQ ID NO: 56904 - DNA, 26 bp, Homo sapiens
  source 1..26: mol_type = genomic DNA
aggggttaggcctctttttaccacca

SEQ ID NO: 56905 - DNA, 23 bp, Homo sapiens
  source 1..23: mol_type = genomic DNA
gtcgtggttgtagtccgtgcgag

SEQ ID NO: 56906 - DNA, 21 bp, Homo sapiens
  source 1..21: mol_type = genomic DNA
agctccgaggtgattttcata

SEQ ID NO: 56907 - DNA, 24 bp, Homo sapiens
  source 1..24: mol_type = genomic DNA
tggtagaattctcgcctgccacgc

SEQ ID NO: 56908 - DNA, 16 bp, Homo sapiens
  source 1..16: mol_type = genomic DNA
cacgtcggggtcacca

SEQ ID NO: 56909 - DNA, 29 bp, Homo sapiens
  source 1..29: mol_type = genomic DNA
gtgatcgtatagtggttagtactctgcgt

SEQ ID NO: 56910 - DNA, 24 bp, Homo sapiens
  source 1..24: mol_type = genomic DNA
gtgtagtggttatcacgttcgcct

SEQ ID NO: 56911 - DNA, 25 bp, Homo sapiens
  source 1..25: mol_type = genomic DNA
gagttaaagactttttctctgacca

SEQ ID NO: 56912 - DNA, 20 bp, Homo sapiens
  source 1..20: mol_type = genomic DNA
cacatcaccccataaacacc

SEQ ID NO: 56913 - DNA, 17 bp, Homo sapiens
  source 1..17: mol_type = genomic DNA
gtttccgtagtgtagtg

SEQ ID NO: 56914 - DNA, 27 bp, Homo sapiens
  source 1..27: mol_type = genomic DNA
aaatggctgagtgaagcattggactgt

SEQ ID NO: 56915 - DNA, 24 bp, Homo sapiens
  source 1..24: mol_type = genomic DNA
ctgtaaagctaacttagcattaac

SEQ ID NO: 56916 - DNA, 21 bp, Homo sapiens
  source 1..21: mol_type = genomic DNA
gaaaaagtcatggaggccatg

SEQ ID NO: 56917 - DNA, 25 bp, Homo sapiens
  source 1..25: mol_type = genomic DNA
gagtgaagcattggactgtaaatct

SEQ ID NO: 56918 - DNA, 18 bp, Homo sapiens
  source 1..18: mol_type = genomic DNA
agtgaagcattggactgt

SEQ ID NO: 56919 - DNA, 25 bp, Homo sapiens
  source 1..25: mol_type = genomic DNA
ggctcacatcaccccataaacacca

SEQ ID NO: 56920 - DNA, 21 bp, Homo sapiens
  source 1..21: mol_type = genomic DNA
gtggttgtagtccgtgcgaga

SEQ ID NO: 56921 - DNA, 21 bp, Homo sapiens
  source 1..21: mol_type = genomic DNA
tatacccttcccgtactacca

SEQ ID NO: 56922 - DNA, 18 bp, Homo sapiens
  source 1..18: mol_type = genomic DNA
ctaatggataaggcactg

SEQ ID NO: 56923 - DNA, 16 bp, Homo sapiens
  source 1..16: mol_type = genomic DNA
ggtcccatggtgtaat

SEQ ID NO: 56924 - DNA, 28 bp, Homo sapiens
  source 1..28: mol_type = genomic DNA
tgatcgtatagtggttagtactctgcgt

SEQ ID NO: 56925 - DNA, 19 bp, Homo sapiens
  source 1..19: mol_type = genomic DNA
agtcggtagagcatgggac

SEQ ID NO: 56926 - DNA, 20 bp, Homo sapiens
  source 1..20: mol_type = genomic DNA
gctccgaggtgattttcata

SEQ ID NO: 56927 - DNA, 23 bp, Homo sapiens
  source 1..23: mol_type = genomic DNA
gttgtagtccgtgcgagaatacc

SEQ ID NO: 56928 - DNA, 23 bp, Homo sapiens
  source 1..23: mol_type = genomic DNA
atatcattggtcgtggttgtagt

SEQ ID NO: 56929 - DNA, 27 bp, Homo sapiens
  source 1..27: mol_type = genomic DNA
aaacatcagattgtgaatctgacaaca

SEQ ID NO: 56930 - DNA, 17 bp, Homo sapiens
  source 1..17: mol_type = genomic DNA
gcgttggtggtatagtg

SEQ ID NO: 56931 - DNA, 23 bp, Homo sapiens
  source 1..23: mol_type = genomic DNA
gagttaaagactttttctctgac

SEQ ID NO: 56932 - DNA, 17 bp, Homo sapiens
  source 1..17: mol_type = genomic DNA
ggggatgtagctcagtg

SEQ ID NO: 56933 - DNA, 22 bp, Homo sapiens
  source 1..22: mol_type = genomic DNA
gtagtcgtggccgagtggttaa

SEQ ID NO: 56934 - DNA, 20 bp, Homo sapiens
  source 1..20: mol_type = genomic DNA
atggtgagcactctggactc

SEQ ID NO: 56935 - DNA, 24 bp, Homo sapiens
  source 1..24: mol_type = genomic DNA
tggttaggattcggcgctctcacc

SEQ ID NO: 56936 - DNA, 29 bp, Homo sapiens
  source 1..29: mol_type = genomic DNA
ccatggtgtaatggttagcactctggact

SEQ ID NO: 56937 - DNA, 21 bp, Homo sapiens
  source 1..21: mol_type = genomic DNA
gtaatggttagcactctggac

SEQ ID NO: 56938 - DNA, 25 bp, Homo sapiens
  source 1..25: mol_type = genomic DNA
tggtcgtggttgtagtccgtgcgag

SEQ ID NO: 56939 - DNA, 26 bp, Homo sapiens
  source 1..26: mol_type = genomic DNA
gtttccgtagtgtagtggtcatcacg

SEQ ID NO: 56940 - DNA, 23 bp, Homo sapiens
  source 1..23: mol_type = genomic DNA
gtcaggatggccgagcggtctaa

SEQ ID NO: 56941 - DNA, 17 bp, Homo sapiens
  source 1..17: mol_type = genomic DNA
gcgccgctggtgtagtg

SEQ ID NO: 56942 - DNA, 26 bp, Homo sapiens
  source 1..26: mol_type = genomic DNA
gtggttgtagtccgtgcgagaatacc

SEQ ID NO: 56943 - DNA, 27 bp, Homo sapiens
  source 1..27: mol_type = genomic DNA
atttcaacttaacttgaccgctctgac

SEQ ID NO: 56944 - DNA, 27 bp, Homo sapiens
  source 1..27: mol_type = genomic DNA
ctggactctgaatccagcgatccgagt

SEQ ID NO: 56945 - DNA, 18 bp, Homo sapiens
  source 1..18: mol_type = genomic DNA
gtccttgtagtataaact

SEQ ID NO: 56946 - DNA, 21 bp, Homo sapiens
  source 1..21: mol_type = genomic DNA
gttcgattccccgacggggag

SEQ ID NO: 56947 - DNA, 18 bp, Homo sapiens
  source 1..18: mol_type = genomic DNA
gtaaaccaggggtcgcga

SEQ ID NO: 56948 - DNA, 22 bp, Homo sapiens
  source 1..22: mol_type = genomic DNA
attggtcgtggttgtagtccgt

SEQ ID NO: 56949 - DNA, 25 bp, Homo sapiens
  source 1..25: mol_type = genomic DNA
gatttcaacttaacttgaccgctct

SEQ ID NO: 56950 - DNA, 22 bp, Homo sapiens
  source 1..22: mol_type = genomic DNA
cttacgaccccttatttacccc

SEQ ID NO: 56951 - DNA, 19 bp, Homo sapiens
  source 1..19: mol_type = genomic DNA
agtggttagtactctgcgt

SEQ ID NO: 56952 - DNA, 25 bp, Homo sapiens
  source 1..25: mol_type = genomic DNA
tcgtatagtggttagtactctgcgt

SEQ ID NO: 56953 - DNA, 18 bp, Homo sapiens
  source 1..18: mol_type = genomic DNA
gtcacgtcggggtcacca

SEQ ID NO: 56954 - DNA, 17 bp, Homo sapiens
  source 1..17: mol_type = genomic DNA
ccccagcatctccacca

SEQ ID NO: 56955 - DNA, 17 bp, Homo sapiens
  source 1..17: mol_type = genomic DNA
gtcaggatggccgagcg

SEQ ID NO: 56956 - DNA, 21 bp, Homo sapiens
  source 1..21: mol_type = genomic DNA
gtagtccgtgcgagaatacca

SEQ ID NO: 56957 - DNA, 26 bp, Homo sapiens
  source 1..26: mol_type = genomic DNA
aatggctgagtgaagcattggactgt

SEQ ID NO: 56958 - DNA, 22 bp, Homo sapiens
  source 1..22: mol_type = genomic DNA
gcgttggtggtatagtggtgag

SEQ ID NO: 56959 - DNA, 20 bp, Homo sapiens
  source 1..20: mol_type = genomic DNA
gttaaagactttttctctga

SEQ ID NO: 56960 - DNA, 25 bp, Homo sapiens
  source 1..25: mol_type = genomic DNA
tccctggtggtctagtggttaggat

SEQ ID NO: 56961 - DNA, 16 bp, Homo sapiens
  source 1..16: mol_type = genomic DNA
caacttaacttgaccg

SEQ ID NO: 56962 - DNA, 16 bp, Homo sapiens
  source 1..16: mol_type = genomic DNA
gtcaggatggccgagc

SEQ ID NO: 56963 - DNA, 27 bp, Homo sapiens
  source 1..27: mol_type = genomic DNA
gtggagttaaagactttttctctgacc

SEQ ID NO: 56964 - DNA, 23 bp, Homo sapiens
  source 1..23: mol_type = genomic DNA
atagtggttagtactctgcgttg

SEQ ID NO: 56965 - DNA, 26 bp, Homo sapiens
  source 1..26: mol_type = genomic DNA
gcgttggtggtatagtggtaagcata

SEQ ID NO: 56966 - DNA, 16 bp, Homo sapiens
  source 1..16: mol_type = genomic DNA
ggttagtactctgcgt

SEQ ID NO: 56967 - DNA, 22 bp, Homo sapiens
  source 1..22: mol_type = genomic DNA
tcgatccccagcatctccacca

SEQ ID NO: 56968 - DNA, 21 bp, Homo sapiens
  source 1..21: mol_type = genomic DNA
agcactctggactctgaatcc

SEQ ID NO: 56969 - DNA, 25 bp, Homo sapiens
  source 1..25: mol_type = genomic DNA
ggagttaaagactttttctctgacc

SEQ ID NO: 56970 - DNA, 24 bp, Homo sapiens
  source 1..24: mol_type = genomic DNA
agttaaagactttttctctgacca

SEQ ID NO: 56971 - DNA, 30 bp, Homo sapiens; identical to SEQ ID NO: 7557
  source 1..30: mol_type = genomic DNA

SEQ ID NO: 56972 - DNA, 17 bp, Homo sapiens
  source 1..17: mol_type = genomic DNA
tccctggtggtctagtg

SEQ ID NO: 56973 - DNA, 28 bp, Homo sapiens
  source 1..28: mol_type = genomic DNA
cgtggttgtagtccgtgcgagaatacca

SEQ ID NO: 56974 - DNA, 21 bp, Homo sapiens
  source 1..21: mol_type = genomic DNA
gcgttcaggtcgcagtctccc

SEQ ID NO: 56975 - DNA, 23 bp, Homo sapiens
  source 1..23: mol_type = genomic DNA
ggttagcactctggactctgaat

SEQ ID NO: 56976 - DNA, 20 bp, Homo sapiens
  source 1..20: mol_type = genomic DNA
cagtcggtagagcatcagac

SEQ ID NO: 56977 - DNA, 16 bp, Homo sapiens
  source 1..16: mol_type = genomic DNA
agactttttctctgac

SEQ ID NO: 56978 - DNA, 26 bp, Homo sapiens
  source 1..26: mol_type = genomic DNA
attggtcgtggttgtagtccgtgcga

SEQ ID NO: 56979 - DNA, 17 bp, Homo sapiens
  source 1..17: mol_type = genomic DNA
attggtcgtggttgtag

SEQ ID NO: 56980 - DNA, 22 bp, Homo sapiens
  source 1..22: mol_type = genomic DNA
ctgccacgcgggaggcccgggt

SEQ ID NO: 56981 - DNA, 17 bp, Homo sapiens
  source 1..17: mol_type = genomic DNA
tcacgtcggggtcacca

SEQ ID NO: 56982 - DNA, 29 bp, Homo sapiens
  source 1..29: mol_type = genomic DNA
taaaatggctgagtgaagcattggactgt

SEQ ID NO: 56983 - DNA, 23 bp, Homo sapiens
  source 1..23: mol_type = genomic DNA
gcccccatgtctaacaacatggc

SEQ ID NO: 56984 - DNA, 20 bp, Homo sapiens
  source 1..20: mol_type = genomic DNA
ggctctgtggcttagttggc

SEQ ID NO: 56985 - DNA, 27 bp, Homo sapiens
  source 1..27: mol_type = genomic DNA
tcgtatagtggttagtactctgcgttg

SEQ ID NO: 56986 - DNA, 20 bp, Homo sapiens
  source 1..20: mol_type = genomic DNA
gcatgggtggttcagtggta

SEQ ID NO: 56987 - DNA, 28 bp, Homo sapiens
  source 1..28: mol_type = genomic DNA
aaatggctgagtgaagcattggactgta

SEQ ID NO: 56988 - DNA, 16 bp, Homo sapiens
  source 1..16: mol_type = genomic DNA
cccagcatctccacca

SEQ ID NO: 56989 - DNA, 20 bp, Homo sapiens
  source 1..20: mol_type = genomic DNA
gggggattagctcaaatggt

SEQ ID NO: 56990 - DNA, 22 bp, Homo sapiens
  source 1..22: mol_type = genomic DNA
gttcgattcccggtcagggaac

SEQ ID NO: 56991 - DNA, 20 bp, Homo sapiens
  source 1..20: mol_type = genomic DNA
gacgaggtggccgagtggtt

SEQ ID NO: 56992 - DNA, 30 bp, Homo sapiens; identical to SEQ ID NO: 10862
  source 1..30: mol_type = genomic DNA

SEQ ID NO: 56993 - DNA, 16 bp, Homo sapiens
  source 1..16: mol_type = genomic DNA
acttgaccgctctgac

SEQ ID NO: 56994 - DNA, 21 bp, Homo sapiens
  source 1..21: mol_type = genomic DNA
tcagtcggtagagcatcagac

SEQ ID NO: 56995 - DNA, 23 bp, Homo sapiens
  source 1..23: mol_type = genomic DNA
atcgtatagtggttagtactctg

SEQ ID NO: 56996 - DNA, 22 bp, Homo sapiens
  source 1..22: mol_type = genomic DNA
atcattggtcgtggttgtagtc

SEQ ID NO: 56997 - DNA, 21 bp, Homo sapiens
  source 1..21: mol_type = genomic DNA
gttaaagactttttctctgac

SEQ ID NO: 56998 - DNA, 28 bp, Homo sapiens
  source 1..28: mol_type = genomic DNA
gatttcaacttaacttgaccgctctgac

SEQ ID NO: 56999 - DNA, 25 bp, Homo sapiens
  source 1..25: mol_type = genomic DNA
ggtagcgtggccgagtggtctaagg

SEQ ID NO: 57000 - DNA, 27 bp, Homo sapiens
  source 1..27: mol_type = genomic DNA
attggtcgtggttgtagtccgtgcgag

SEQ ID NO: 57001 - DNA, 19 bp, Homo sapiens
  source 1..19: mol_type = genomic DNA
gccccggtggcctaatgga

SEQ ID NO: 57002 - DNA, 22 bp, Homo sapiens
  source 1..22: mol_type = genomic DNA
tatagtggttagtactctgcgt

SEQ ID NO: 57003 - DNA, 26 bp, Homo sapiens
  source 1..26: mol_type = genomic DNA
ttggtcgtggttgtagtccgtgcgag

SEQ ID NO: 57004 - DNA, 17 bp, Homo sapiens
  source 1..17: mol_type = genomic DNA
ggtagcgtggccgagcg

SEQ ID NO: 57005 - DNA, 30 bp, Homo sapiens; identical to SEQ ID NO: 6404
  source 1..30: mol_type = genomic DNA

SEQ ID NO: 57006 - DNA, 17 bp, Homo sapiens
  source 1..17: mol_type = genomic DNA
tggttaggattcggcgc

SEQ ID NO: 57007 - DNA, 22 bp, Homo sapiens
  source 1..22: mol_type = genomic DNA
agttaaagactttttctctgac

SEQ ID NO: 57008 - DNA, 30 bp, Homo sapiens; identical to SEQ ID NO: 24007
  source 1..30: mol_type = genomic DNA

SEQ ID NO: 57009 - DNA, 18 bp, Homo sapiens
  source 1..18: mol_type = genomic DNA
gtcaggatggccgagcgg

SEQ ID NO: 57010 - DNA, 18 bp, Homo sapiens
  source 1..18: mol_type = genomic DNA
atcacgtcggggtcacca

SEQ ID NO: 57011 - DNA, 24 bp, Homo sapiens
  source 1..24: mol_type = genomic DNA
gtcaggatggccgagcggtctaag

SEQ ID NO: 57012 - DNA, 20 bp, Homo sapiens
  source 1..20: mol_type = genomic DNA
agtggtagagcatttgactg

SEQ ID NO: 57013 - DNA, 29 bp, Homo sapiens
  source 1..29: mol_type = genomic DNA
gtcgtggttgtagtccgtgcgagaatacc

SEQ ID NO: 57014 - DNA, 28 bp, Homo sapiens
  source 1..28: mol_type = genomic DNA
gcgttggtggtatagtggtgagcatagc

SEQ ID NO: 57015 - DNA, 25 bp, Homo sapiens
  source 1..25: mol_type = genomic DNA
ttcaacttaacttgaccgctctgac

SEQ ID NO: 57016 - DNA, 24 bp, Homo sapiens
  source 1..24: mol_type = genomic DNA
gcccggatagctcagtcggtagag

SEQ ID NO: 57017 - DNA, 25 bp, Homo sapiens
  source 1..25: mol_type = genomic DNA
ggggttaggcctctttttaccacca

SEQ ID NO: 57018 - DNA, 24 bp, Homo sapiens
  source 1..24: mol_type = genomic DNA
tatagtggttagtactctgcgttg

SEQ ID NO: 57019 - DNA, 26 bp, Homo sapiens
  source 1..26: mol_type = genomic DNA
ggttccatagtgtagtggttatcacg

SEQ ID NO: 57020 - DNA, 22 bp, Homo sapiens
  source 1..22: mol_type = genomic DNA
tgagtgaagcattggactgtaa

SEQ ID NO: 57021 - DNA, 30 bp, Homo sapiens; identical to SEQ ID NO: 27367
  source 1..30: mol_type = genomic DNA

SEQ ID NO: 57022 - DNA, 18 bp, Homo sapiens
  source 1..18: mol_type = genomic DNA
atggttagcactctggac

SEQ ID NO: 57023 - DNA, 21 bp, Homo sapiens
  source 1..21: mol_type = genomic DNA
ggggatgtagctcagtggtag

SEQ ID NO: 57024 - DNA, 30 bp, Homo sapiens; identical to SEQ ID NO: 22490
  source 1..30: mol_type = genomic DNA

SEQ ID NO: 57025 - DNA, 23 bp, Homo sapiens
  source 1..23: mol_type = genomic DNA
ggtagcgtggccgagcggtctaa

SEQ ID NO: 57026 - DNA, 17 bp, Homo sapiens
  source 1..17: mol_type = genomic DNA
aagactttttctctgac

SEQ ID NO: 57027 - DNA, 22 bp, Homo sapiens
  source 1..22: mol_type = genomic DNA
ggtagcgtggccgagtggtcta

SEQ ID NO: 57028 - DNA, 20 bp, Homo sapiens
  source 1..20: mol_type = genomic DNA
gcgccgctggtgtagtggta

SEQ ID NO: 57029 - DNA, 25 bp, Homo sapiens
  source 1..25: mol_type = genomic DNA
gtttccgtagtgtagtggttatcac

SEQ ID NO: 57030 - DNA, 20 bp, Homo sapiens
  source 1..20: mol_type = genomic DNA
gggggtgtagctcagtggta

SEQ ID NO: 57031 - DNA, 18 bp, Homo sapiens
  source 1..18: mol_type = genomic DNA
aaagactttttctctgac

SEQ ID NO: 57032 - DNA, 24 bp, Homo sapiens
  source 1..24: mol_type = genomic DNA
tcaacttaacttgaccgctctgac

SEQ ID NO: 57033 - DNA, 23 bp, Homo sapiens
  source 1..23: mol_type = genomic DNA
tatcattggtcgtggttgtagtc

SEQ ID NO: 57034 - DNA, 22 bp, Homo sapiens
  source 1..22: mol_type = genomic DNA
ggttcgattccccgacggggag

SEQ ID NO: 57035 - DNA, 26 bp, Homo sapiens
  source 1..26: mol_type = genomic DNA
tttcaacttaacttgaccgctctgac

SEQ ID NO: 57036 - DNA, 21 bp, Homo sapiens
  source 1..21: mol_type = genomic DNA
tggtcgtggttgtagtccgtg

SEQ ID NO: 57037 - DNA, 30 bp, Homo sapiens; identical to SEQ ID NO: 27558
  source 1..30: mol_type = genomic DNA

SEQ ID NO: 57038 - DNA, 23 bp, Homo sapiens
  source 1..23: mol_type = genomic DNA
ggttccatagtgtagtggttatc

SEQ ID NO: 57039 - DNA, 22 bp, Homo sapiens
  source 1..22: mol_type = genomic DNA
tcgaatccgagtcacggcacca

SEQ ID NO: 57040 - DNA, 21 bp, Homo sapiens
  source 1..21: mol_type = genomic DNA
gcatgggtggttcagtggtag

SEQ ID NO: 57041 - DNA, 23 bp, Homo sapiens
  source 1..23: mol_type = genomic DNA
gttcgattccccgacggggagcc

SEQ ID NO: 57042 - DNA, 22 bp, Homo sapiens
  source 1..22: mol_type = genomic DNA
gttcgattccccgacggggagc

SEQ ID NO: 57043 - DNA, 26 bp, Homo sapiens
  source 1..26: mol_type = genomic DNA
gcgttggtggtatagtggtgagcata

SEQ ID NO: 57044 - DNA, 21 bp, Homo sapiens
  source 1..21: mol_type = genomic DNA
agtggttagtactctgcgttg

SEQ ID NO: 57045 - DNA, 27 bp, Homo sapiens
  source 1..27: mol_type = genomic DNA
ttggtcgtggttgtagtccgtgcgaga

SEQ ID NO: 57046 - DNA, 20 bp, Homo sapiens
  source 1..20: mol_type = genomic DNA
tagtggttaggattcggcgc

SEQ ID NO: 57047 - DNA, 19 bp, Homo sapiens
  source 1..19: mol_type = genomic DNA
taaagactttttctctgac

SEQ ID NO: 57048 - DNA, 24 bp, Homo sapiens
  source 1..24: mol_type = genomic DNA
ggttcgattccccgacggggagcc

SEQ ID NO: 57049 - DNA, 24 bp, Homo sapiens
  source 1..24: mol_type = genomic DNA
gcgttggtggtatagtggtgagca

SEQ ID NO: 57050 - DNA, 19 bp, Homo sapiens
  source 1..19: mol_type = genomic DNA
tagaattctcgcctgccac

SEQ ID NO: 57051 - DNA, 18 bp, Homo sapiens
  source 1..18: mol_type = genomic DNA
ggttagtactctgcgttg

SEQ ID NO: 57052 - DNA, 24 bp, Homo sapiens
  source 1..24: mol_type = genomic DNA
gggggtatagctcagtggtagagc

SEQ ID NO: 57053 - DNA, 23 bp, Homo sapiens
  source 1..23: mol_type = genomic DNA
gcgttggtggtatagtggttagc

SEQ ID NO: 57054 - DNA, 26 bp, Homo sapiens
  source 1..26: mol_type = genomic DNA
gtttccgtagtgtagtggttatcacg

SEQ ID NO: 57055 - DNA, 22 bp, Homo sapiens
  source 1..22: mol_type = genomic DNA
ctgtcacgcgggagaccggggt

SEQ ID NO: 57056 - DNA, 26 bp, Homo sapiens
  source 1..26: mol_type = genomic DNA
atagctcagtggtagagcatttgact

SEQ ID NO: 57057 - DNA, 28 bp, Homo sapiens
  source 1..28: mol_type = genomic DNA
atttcaacttaacttgaccgctctgacc

SEQ ID NO: 57058 - DNA, 20 bp, Homo sapiens
  source 1..20: mol_type = genomic DNA
gcattggtggttcagtggta

SEQ ID NO: 57059 - DNA, 18 bp, Homo sapiens
  source 1..18: mol_type = genomic DNA
gtggttagtactctgcgt

SEQ ID NO: 57060 - DNA, 23 bp, Homo sapiens
  source 1..23: mol_type = genomic DNA
gagatttcaacttaacttgaccg

SEQ ID NO: 57061 - DNA, 22 bp, Homo sapiens
  source 1..22: mol_type = genomic DNA
ctgagtgaagcattggactgta

SEQ ID NO: 57062 - DNA, 30 bp, Homo sapiens; identical to SEQ ID NO: 6208
  source 1..30: mol_type = genomic DNA

SEQ ID NO: 57063 - DNA, 20 bp, Homo sapiens
  source 1..20: mol_type = genomic DNA
tgagtgaagcattggactgt

SEQ ID NO: 57064 - DNA, 23 bp, Homo sapiens
  source 1..23: mol_type = genomic DNA
ggggatgtagctcagtggtagag

SEQ ID NO: 57065 - DNA, 21 bp, Homo sapiens
  source 1..21: mol_type = genomic DNA
atggttagcactctggactct

SEQ ID NO: 57066 - DNA, 20 bp, Homo sapiens
  source 1..20: mol_type = genomic DNA
gatttcaacttaacttgacc

SEQ ID NO: 57067 - DNA, 20 bp, Homo sapiens
  source 1..20: mol_type = genomic DNA
ggggatgtagctcagtggta

SEQ ID NO: 57068 - DNA, 24 bp, Homo sapiens
  source 1..24: mol_type = genomic DNA
gttgtagtccgtgcgagaatacca

SEQ ID NO: 57069 - DNA, 19 bp, Homo sapiens
  source 1..19: mol_type = genomic DNA
ggtcccatggtgtaatggt

SEQ ID NO: 57070 - DNA, 17 bp, Homo sapiens
  source 1..17: mol_type = genomic DNA
aacttgaccgctctgac

SEQ ID NO: 57071 - DNA, 23 bp, Homo sapiens
  source 1..23: mol_type = genomic DNA
gtagtcgtggccgagtggttaag

SEQ ID NO: 57072 - DNA, 25 bp, Homo sapiens
  source 1..25: mol_type = genomic DNA
gtgtaatggttagcactctggactc

SEQ ID NO: 57073 - DNA, 23 bp, Homo sapiens
  source 1..23: mol_type = genomic DNA
attggtcgtggttgtagtccgtg

SEQ ID NO: 57074 - DNA, 18 bp, Homo sapiens
  source 1..18: mol_type = genomic DNA
taacttgaccgctctgac

SEQ ID NO: 57075 - DNA, 18 bp, Homo sapiens
  source 1..18: mol_type = genomic DNA
tccccagtacctccacca

SEQ ID NO: 57076 - DNA, 25 bp, Homo sapiens
  source 1..25: mol_type = genomic DNA
attggtcgtggttgtagtccgtgcg

SEQ ID NO: 57077 - DNA, 20 bp, Homo sapiens
  source 1..20: mol_type = genomic DNA
ggccggttagctcagttggt

SEQ ID NO: 57078 - DNA, 23 bp, Homo sapiens
  source 1..23: mol_type = genomic DNA
gttaaagactttttctctgacca

SEQ ID NO: 57079 - DNA, 17 bp, Homo sapiens
  source 1..17: mol_type = genomic DNA
tggttagtactctgcgt

SEQ ID NO: 57080 - DNA, 23 bp, Homo sapiens
  source 1..23: mol_type = genomic DNA
caacttaacttgaccgctctgac

SEQ ID NO: 57081 - DNA, 24 bp, Homo sapiens
  source 1..24: mol_type = genomic DNA
ggcgcggtggccaagtggtaaggc

SEQ ID NO: 57082 - DNA, 23 bp, Homo sapiens
  source 1..23: mol_type = genomic DNA
gtaatggttagcactctggactc

SEQ ID NO: 57083 - DNA, 27 bp, Homo sapiens
  source 1..27: mol_type = genomic DNA
tttcaacttaacttgaccgctctgacc

SEQ ID NO: 57084 - DNA, 26 bp, Homo sapiens
  source 1..26: mol_type = genomic DNA
ttcaacttaacttgaccgctctgacc

SEQ ID NO: 57085 - DNA, 30 bp, Homo sapiens; identical to SEQ ID NO: 19439
  source 1..30: mol_type = genomic DNA

SEQ ID NO: 57086 - DNA, 22 bp, Homo sapiens
  source 1..22: mol_type = genomic DNA
gttaaagactttttctctgacc

SEQ ID NO: 57087 - DNA, 20 bp, Homo sapiens
  source 1..20: mol_type = genomic DNA
gtctctgtggcgcaatcggt

SEQ ID NO: 57088 - DNA, 20 bp, Homo sapiens
  source 1..20: mol_type = genomic DNA
tagtggttagtactctgcgt

SEQ ID NO: 57089 - DNA, 24 bp, Homo sapiens
  source 1..24: mol_type = genomic DNA
gagttaaagactttttctctgacc

SEQ ID NO: 57090 - DNA, 16 bp, Homo sapiens
  source 1..16: mol_type = genomic DNA
gactttttctctgacc

SEQ ID NO: 57091 - DNA, 22 bp, Homo sapiens
  source 1..22: mol_type = genomic DNA
aacttaacttgaccgctctgac

SEQ ID NO: 57092 - DNA, 19 bp, Homo sapiens
  source 1..19: mol_type = genomic DNA
ttaacttgaccgctctgac

SEQ ID NO: 57093 - DNA, 24 bp, Homo sapiens
  source 1..24: mol_type = genomic DNA
ggtagcgtggccgagcggtctaag

SEQ ID NO: 57094 - DNA, 19 bp, Homo sapiens
  source 1..19: mol_type = genomic DNA
ggctctgtggcgcaatgga

SEQ ID NO: 57095 - DNA, 19 bp, Homo sapiens
  source 1..19: mol_type = genomic DNA
gaccgcgtggcctaatgga

SEQ ID NO: 57096 - DNA, 19 bp, Homo sapiens
  source 1..19: mol_type = genomic DNA
tggtagaattctcgcctgc

SEQ ID NO: 57097 - DNA, 25 bp, Homo sapiens
  source 1..25: mol_type = genomic DNA
ggtagcgtggccgagcggtctaagg

SEQ ID NO: 57098 - DNA, 22 bp, Homo sapiens
  source 1..22: mol_type = genomic DNA
ttaaagactttttctctgacca

SEQ ID NO: 57099 - DNA, 29 bp, Homo sapiens
  source 1..29: mol_type = genomic DNA
cattggtcgtggttgtagtccgtgcgaga

SEQ ID NO: 57100 - DNA, 19 bp, Homo sapiens
  source 1..19: mol_type = genomic DNA
gagtgaagcattggactgt

SEQ ID NO: 57101 - DNA, 29 bp, Homo sapiens
  source 1..29: mol_type = genomic DNA
atttcaacttaacttgaccgctctgacca

SEQ ID NO: 57102 - DNA, 17 bp, Homo sapiens
  source 1..17: mol_type = genomic DNA
acttgaccgctctgacc

SEQ ID NO: 57103 - DNA, 23 bp, Homo sapiens
  source 1..23: mol_type = genomic DNA
agttaaagactttttctctgacc

SEQ ID NO: 57104 - DNA, 22 bp, Homo sapiens
  source 1..22: mol_type = genomic DNA
ggtagcgtggccgagcggtcta

SEQ ID NO: 57105 - DNA, 30 bp, Homo sapiens; identical to SEQ ID NO: 27986
  source 1..30: mol_type = genomic DNA

SEQ ID NO: 57106 - DNA, 26 bp, Homo sapiens
  source 1..26: mol_type = genomic DNA
cgtatagtggttagtactctgcgttg

SEQ ID NO: 57107 - DNA, 17 bp, Homo sapiens
  source 1..17: mol_type = genomic DNA
tccgggtgccccctcca

SEQ ID NO: 57108 - DNA, 21 bp, Homo sapiens
  source 1..21: mol_type = genomic DNA
gtggttagtactctgcgttgt

SEQ ID NO: 57109 - DNA, 19 bp, Homo sapiens
  source 1..19: mol_type = genomic DNA
gacccagtggcctaatgga

SEQ ID NO: 57110 - DNA, 25 bp, Homo sapiens
  source 1..25: mol_type = genomic DNA
tcaacttaacttgaccgctctgacc

SEQ ID NO: 57111 - DNA, 23 bp, Homo sapiens
  source 1..23: mol_type = genomic DNA
tagtggttagtactctgcgttgt

SEQ ID NO: 57112 - DNA, 20 bp, Homo sapiens
  source 1..20: mol_type = genomic DNA
tggttagtactctgcgttgt

SEQ ID NO: 57113 - DNA, 19 bp, Homo sapiens
  source 1..19: mol_type = genomic DNA
gccccagtggcctaatgga

SEQ ID NO: 57114 - DNA, 22 bp, Homo sapiens
  source 1..22: mol_type = genomic DNA
tagtggttagtactctgcgttg

SEQ ID NO: 57115 - DNA, 17 bp, Homo sapiens
  source 1..17: mol_type = genomic DNA
agactttttctctgacc

SEQ ID NO: 57116 - DNA, 19 bp, Homo sapiens
  source 1..19: mol_type = genomic DNA
tggttagtactctgcgttg

SEQ ID NO: 57117 - DNA, 21 bp, Homo sapiens
  source 1..21: mol_type = genomic DNA
tgagtgaagcattggactgta

SEQ ID NO: 57118 - DNA, 20 bp, Homo sapiens
  source 1..20: mol_type = genomic DNA
gtggttagtactctgcgttg

SEQ ID NO: 57119 - DNA, 21 bp, Homo sapiens
  source 1..21: mol_type = genomic DNA
ttaaagactttttctctgacc

SEQ ID NO: 57120 - DNA, 18 bp, Homo sapiens
  source 1..18: mol_type = genomic DNA
aagactttttctctgacc

SEQ ID NO: 57121 - DNA, 19 bp, Homo sapiens
  source 1..19: mol_type = genomic DNA
ggccgcgtggcctaatgga

SEQ ID NO: 57122 - DNA, 27 bp, Homo sapiens
  source 1..27: mol_type = genomic DNA
ttcaacttaacttgaccgctctgacca

SEQ ID NO: 57123 - DNA, 20 bp, Homo sapiens
  source 1..20: mol_type = genomic DNA
atggttagcactctggactc

SEQ ID NO: 57124 - DNA, 19 bp, Homo sapiens
  source 1..19: mol_type = genomic DNA
aaagactttttctctgacc

SEQ ID NO: 57125 - DNA, 19 bp, Homo sapiens
  source 1..19: mol_type = genomic DNA
ggctccgtggcgcaatgga

SEQ ID NO: 57126 - DNA, 24 bp, Homo sapiens
  source 1..24: mol_type = genomic DNA
gttcgattccccgacggggagcca

SEQ ID NO: 57127 - DNA, 20 bp, Homo sapiens
  source 1..20: mol_type = genomic DNA
aaagactttttctctgacca

SEQ ID NO: 57128 - DNA, 19 bp, Homo sapiens
  source 1..19: mol_type = genomic DNA
atggttagcactctggact

SEQ ID NO: 57129 - DNA, 19 bp, Homo sapiens
  source 1..19: mol_type = genomic DNA
gggccagtggcgcaatgga

SEQ ID NO: 57130 - DNA, 30 bp, Homo sapiens; identical to SEQ ID NO: 25700
  source 1..30: mol_type = genomic DNA

SEQ ID NO: 57131 - DNA, 24 bp, Homo sapiens
  source 1..24: mol_type = genomic DNA
caacttaacttgaccgctctgacc

SEQ ID NO: 57132 - DNA, 26 bp, Homo sapiens
  source 1..26: mol_type = genomic DNA
tcaacttaacttgaccgctctgacca

SEQ ID NO: 57133 - DNA, 20 bp, Homo sapiens
  source 1..20: mol_type = genomic DNA
taaagactttttctctgacc

SEQ ID NO: 57134 - DNA, 19 bp, Homo sapiens
  source 1..19: mol_type = genomic DNA
taacttgaccgctctgacc

SEQ ID NO: 57135 - DNA, 22 bp, Homo sapiens
  source 1..22: mol_type = genomic DNA
ggggatgtagctcagtggtaga

SEQ ID NO: 57136 - DNA, 18 bp, Homo sapiens
  source 1..18: mol_type = genomic DNA
aacttgaccgctctgacc

SEQ ID NO: 57137 - DNA, 29 bp, Homo sapiens
  source 1..29: mol_type = genomic DNA
gatttcaacttaacttgaccgctctgacc

SEQ ID NO: 57138 - DNA, 28 bp, Homo sapiens
  source 1..28: mol_type = genomic DNA
attggtcgtggttgtagtccgtgcgaga

SEQ ID NO: 57139 - DNA, 23 bp, Homo sapiens
  source 1..23: mol_type = genomic DNA
aacttaacttgaccgctctgacc

SEQ ID NO: 57140 - DNA, 28 bp, Homo sapiens
  source 1..28: mol_type = genomic DNA
tttcaacttaacttgaccgctctgacca

SEQ ID NO: 57141 - DNA, 25 bp, Homo sapiens
  source 1..25: mol_type = genomic DNA
caacttaacttgaccgctctgacca

SEQ ID NO: 57142 - DNA, 24 bp, Homo sapiens
  source 1..24: mol_type = genomic DNA
aacttaacttgaccgctctgacca

SEQ ID NO: 57143 - DNA, 31 bp, Homo sapiens; identical to SEQ ID NO: 18802
  source 1..31: mol_type = genomic DNA

SEQ ID NO: 57144 - DNA, 37 bp, Homo sapiens; identical to SEQ ID NO: 14224
  source 1..37: mol_type = genomic DNA

SEQ ID NO: 57145 - DNA, 22 bp, Homo sapiens
  source 1..22: mol_type = genomic DNA
gggttcgactcccggtatggga

SEQ ID NO: 57146 - DNA, 20 bp, Homo sapiens
  source 1..20: mol_type = genomic DNA
gagtggttaaggcattggac

SEQ ID NO: 57147 - DNA, 29 bp, Homo sapiens
  source 1..29: mol_type = genomic DNA
ggcggcccgggttcgactcccggtgtggg

SEQ ID NO: 57148 - DNA, 25 bp, Homo sapiens
  source 1..25: mol_type = genomic DNA
tagtgtagtggttatcacgttcgcc

SEQ ID NO: 57149 - DNA, 38 bp, Homo sapiens; identical to SEQ ID NO: 33911
  source 1..38: mol_type = genomic DNA

SEQ ID NO: 57150 - DNA, 25 bp, Homo sapiens
  source 1..25: mol_type = genomic DNA
aggttcgaatcctgccgactacgcc

SEQ ID NO: 57151 - DNA, 22 bp, Homo sapiens
  source 1..22: mol_type = genomic DNA
gttcgagcctcagagagggcac

SEQ ID NO: 57152 - DNA, 25 bp, Homo sapiens
  source 1..25: mol_type = genomic DNA
gcgggttcgaaccccgtccgtgcct

SEQ ID NO: 57153 - DNA, 18 bp, Homo sapiens
  source 1..18: mol_type = genomic DNA
atcctgctcacagcgcca

SEQ ID NO: 57154 - DNA, 16 bp, Homo sapiens
  source 1..16: mol_type = genomic DNA
ggtagagcagaggact

SEQ ID NO: 57155 - DNA, 31 bp, Homo sapiens; identical to SEQ ID NO: 18659
  source 1..31: mol_type = genomic DNA

SEQ ID NO: 57156 - DNA, 27 bp, Homo sapiens
  source 1..27: mol_type = genomic DNA
gggggtgtagctcagtggtagagcgcg

SEQ ID NO: 57157 - DNA, 23 bp, Homo sapiens
  source 1..23: mol_type = genomic DNA
ttccccgcacaggttcgaatcct

SEQ ID NO: 57158 - DNA, 33 bp, Homo sapiens; identical to SEQ ID NO: 16830
  source 1..33: mol_type = genomic DNA

SEQ ID NO: 57159 - DNA, 17 bp, Homo sapiens
  source 1..17: mol_type = genomic DNA
cagagtggcgcagcgga

SEQ ID NO: 57160 - DNA, 27 bp, Homo sapiens
  source 1..27: mol_type = genomic DNA
aggcggcccgggttcgactcccggtgt

SEQ ID NO: 57161 - DNA, 31 bp, Homo sapiens; identical to SEQ ID NO: 10480
  source 1..31: mol_type = genomic DNA

SEQ ID NO: 57162 - DNA, 33 bp, Homo sapiens; identical to SEQ ID NO: 8581
  source 1..33: mol_type = genomic DNA

SEQ ID NO: 57163 - DNA, 23 bp, Homo sapiens
  source 1..23: mol_type = genomic DNA
gggccagtggcgcaatggataac

SEQ ID NO: 57164 - DNA, 26 bp, Homo sapiens
  source 1..26: mol_type = genomic DNA
tggtgtaatggtaagcactctggact

SEQ ID NO: 57165 - DNA, 29 bp, Homo sapiens
  source 1..29: mol_type = genomic DNA
gtcgctggttcgattccggctcgaaggac

SEQ ID NO: 57166 - DNA, 36 bp, Homo sapiens; identical to SEQ ID NO: 3549
  source 1..36: mol_type = genomic DNA

SEQ ID NO: 57167 - DNA, 38 bp, Homo sapiens; identical to SEQ ID NO: 7116
  source 1..38: mol_type = genomic DNA

SEQ ID NO: 57168 - DNA, 34 bp, Homo sapiens; identical to SEQ ID NO: 9470
  source 1..34: mol_type = genomic DNA

SEQ ID NO: 57169 - DNA, 27 bp, Homo sapiens
  source 1..27: mol_type = genomic DNA
tgagggttcgaatcccttcgtggttgc

SEQ ID NO: 57170 - DNA, 17 bp, Homo sapiens
  source 1..17: mol_type = genomic DNA
tggtcatcacgttcgcc

SEQ ID NO: 57171 - DNA, 19 bp, Homo sapiens
  source 1..19: mol_type = genomic DNA
gttcgattcccggccaatg

SEQ ID NO: 57172 - DNA, 16 bp, Homo sapiens
  source 1..16: mol_type = genomic DNA
cccggtgtgggaacca

SEQ ID NO: 57173 - DNA, 34 bp, Homo sapiens; identical to SEQ ID NO: 4922
  source 1..34: mol_type = genomic DNA

SEQ ID NO: 57174 - DNA, 21 bp, Homo sapiens
  source 1..21: mol_type = genomic DNA
gcaatggatagcgcattggac

SEQ ID NO: 57175 - DNA, 28 bp, Homo sapiens
  source 1..28: mol_type = genomic DNA
cctggtggtctagtggctaggattcggc

SEQ ID NO: 57176 - DNA, 29 bp, Homo sapiens
  source 1..29: mol_type = genomic DNA
ttggtggttcgagcccacccagggacgcc

SEQ ID NO: 57177 - DNA, 16 bp, Homo sapiens
  source 1..16: mol_type = genomic DNA
tagctcagtcggtaga

SEQ ID NO: 57178 - DNA, 27 bp, Homo sapiens
  source 1..27: mol_type = genomic DNA
gcgtgggttcgaatcccatcctcgtcg

SEQ ID NO: 57179 - DNA, 18 bp, Homo sapiens
  source 1..18: mol_type = genomic DNA
tttgggtgcgagaggtcc

SEQ ID NO: 57180 - DNA, 32 bp, Homo sapiens; identical to SEQ ID NO: 132
  source 1..32: mol_type = genomic DNA

SEQ ID NO: 57181 - DNA, 28 bp, Homo sapiens
  source 1..28: mol_type = genomic DNA
gcgccgctggtgtagtggtatcatgcaa

SEQ ID NO: 57182 - DNA, 17 bp, Homo sapiens
  source 1..17: mol_type = genomic DNA
cactgtaaagctaactt

SEQ ID NO: 57183 - DNA, 40 bp, Homo sapiens; identical to SEQ ID NO: 11506
  source 1..40: mol_type = genomic DNA

SEQ ID NO: 57184 - DNA, 24 bp, Homo sapiens
  source 1..24: mol_type = genomic DNA
cgggttcgactcccggtatgggaa

SEQ ID NO: 57185 - DNA, 20 bp, Homo sapiens
  source 1..20: mol_type = genomic DNA
tgtaatggttagcactctgg

SEQ ID NO: 57186 - DNA, 33 bp, Homo sapiens; identical to SEQ ID NO: 10729
  source 1..33: mol_type = genomic DNA

SEQ ID NO: 57187 - DNA, 18 bp, Homo sapiens
  source 1..18: mol_type = genomic DNA
cgagccccacgttgggcg

SEQ ID NO: 57188 - DNA, 23 bp, Homo sapiens
  source 1..23: mol_type = genomic DNA
gggttcgaatcccttcgtggttg

SEQ ID NO: 57189 - DNA, 33 bp, Homo sapiens; identical to SEQ ID NO: 26788
  source 1..33: mol_type = genomic DNA

SEQ ID NO: 57190 - DNA, 29 bp, Homo sapiens
  source 1..29: mol_type = genomic DNA
gctagctcagtcggtagagcatgagactc

SEQ ID NO: 57191 - DNA, 29 bp, Homo sapiens
  source 1..29: mol_type = genomic DNA
taggatggggtgtgataggtggcacggag

SEQ ID NO: 57192 - DNA, 20 bp, Homo sapiens
  source 1..20: mol_type = genomic DNA
cggttaggattcctggtttt

SEQ ID NO: 57193 - DNA, 37 bp, Homo sapiens; identical to SEQ ID NO: 24651
  source 1..37: mol_type = genomic DNA

SEQ ID NO: 57194 - DNA, 27 bp, Homo sapiens
  source 1..27: mol_type = genomic DNA
gtttccgtagtgtagtggttatcacgt

SEQ ID NO: 57195 - DNA, 35 bp, Homo sapiens; identical to SEQ ID NO: 14588
  source 1..35: mol_type = genomic DNA

SEQ ID NO: 57196 - DNA, 26 bp, Homo sapiens
  source 1..26: mol_type = genomic DNA
attggtcgtggttgtagtccgtgcga

SEQ ID NO: 57197 - DNA, 17 bp, Homo sapiens
  source 1..17: mol_type = genomic DNA
tgcccgcatcctccacc

SEQ ID NO: 57198 - DNA, 25 bp, Homo sapiens
  source 1..25: mol_type = genomic DNA
gcctggatagctcagttggtagagc

SEQ ID NO: 57199 - DNA, 22 bp, Homo sapiens
  source 1..22: mol_type = genomic DNA
gggttcgattccccgacgggga

SEQ ID NO: 57200 - DNA, 32 bp, Homo sapiens; identical to SEQ ID NO: 9989
  source 1..32: mol_type = genomic DNA

SEQ ID NO: 57201 - DNA, 17 bp, Homo sapiens
  source 1..17: mol_type = genomic DNA
gcccggatagctcagtc

SEQ ID NO: 57202 - DNA, 16 bp, Homo sapiens
  source 1..16: mol_type = genomic DNA
ggttaaggcattggac

SEQ ID NO: 57203 - DNA, 33 bp, Homo sapiens; identical to SEQ ID NO: 25909
  source 1..33: mol_type = genomic DNA

SEQ ID NO: 57204 - DNA, 30 bp, Homo sapiens; identical to SEQ ID NO: 1566
  source 1..30: mol_type = genomic DNA

SEQ ID NO: 57205 - DNA, 26 bp, Homo sapiens
  source 1..26: mol_type = genomic DNA
cctcggttcgaatccgagtcacggca

SEQ ID NO: 57206 - DNA, 17 bp, Homo sapiens
  source 1..17: mol_type = genomic DNA
ggtagaattctcgcctg

SEQ ID NO: 57207 - DNA, 16 bp, Homo sapiens
  source 1..16: mol_type = genomic DNA
ggccggttagctcagt

SEQ ID NO: 57208 - DNA, 23 bp, Homo sapiens
  source 1..23: mol_type = genomic DNA
tttgggtgcgagaggtcccgggt

SEQ ID NO: 57209 - DNA, 39 bp, Homo sapiens; identical to SEQ ID NO: 23349
  source 1..39: mol_type = genomic DNA

SEQ ID NO: 57210 - DNA, 21 bp, Homo sapiens
  source 1..21: mol_type = genomic DNA
agggattgtgggttcgagtcc

SEQ ID NO: 57211 - DNA, 19 bp, Homo sapiens
  source 1..19: mol_type = genomic DNA
caagtctcggtggaacctc

SEQ ID NO: 57212 - DNA, 29 bp, Homo sapiens
  source 1..29: mol_type = genomic DNA
tcagtcggtagagcatgagactcttaatc

SEQ ID NO: 57213 - DNA, 22 bp, Homo sapiens
  source 1..22: mol_type = genomic DNA
tcgtatagtggttagtactctg

SEQ ID NO: 57214 - DNA, 23 bp, Homo sapiens
  source 1..23: mol_type = genomic DNA
ggttagcactctggactttgaat

SEQ ID NO: 57215 - DNA, 38 bp, Homo sapiens; identical to SEQ ID NO: 3099
  source 1..38: mol_type = genomic DNA

SEQ ID NO: 57216 - DNA, 39 bp, Homo sapiens; identical to SEQ ID NO: 30826
  source 1..39: mol_type = genomic DNA

SEQ ID NO: 57217 - DNA, 31 bp, Homo sapiens; identical to SEQ ID NO: 31615
  source 1..31: mol_type = genomic DNA

SEQ ID NO: 57218 - DNA, 38 bp, Homo sapiens; identical to SEQ ID NO: 33917
  source 1..38: mol_type = genomic DNA

SEQ ID NO: 57219 - DNA, 38 bp, Homo sapiens; identical to SEQ ID NO: 8486
  source 1..38: mol_type = genomic DNA

SEQ ID NO: 57220 - DNA, 45 bp, Homo sapiens; identical to SEQ ID NO: 19945
  source 1..45: mol_type = genomic DNA

SEQ ID NO: 57221 - DNA, 19 bp, Homo sapiens
  source 1..19: mol_type = genomic DNA
gtagtcgtggccgagtggt

SEQ ID NO: 57222 - DNA, 41 bp, Homo sapiens; identical to SEQ ID NO: 19531
  source 1..41: mol_type = genomic DNA

SEQ ID NO: 57223 - DNA, 38 bp, Homo sapiens; identical to SEQ ID NO: 28300
  source 1..38: mol_type = genomic DNA

SEQ ID NO: 57224 - DNA, 22 bp, Homo sapiens
  source 1..22: mol_type = genomic DNA
gttaagatggcagagcccggta

SEQ ID NO: 57225 - DNA, 30 bp, Homo sapiens; identical to SEQ ID NO: 24039
  source 1..30: mol_type = genomic DNA

SEQ ID NO: 57226 - DNA, 27 bp, Homo sapiens
  source 1..27: mol_type = genomic DNA
ggggatgtagctcagtggtagagcgca

SEQ ID NO: 57227 - DNA, 19 bp, Homo sapiens
  source 1..19: mol_type = genomic DNA
cggtagagcatgagactct

SEQ ID NO: 57228 - DNA, 33 bp, Homo sapiens; identical to SEQ ID NO: 15309
  source 1..33: mol_type = genomic DNA

SEQ ID NO: 57229 - DNA, 39 bp, Homo sapiens; identical to SEQ ID NO: 19940
  source 1..39: mol_type = genomic DNA

SEQ ID NO: 57230 - DNA, 22 bp, Homo sapiens
  source 1..22: mol_type = genomic DNA
ggttagcactctggactctgaa

SEQ ID NO: 57231 - DNA, 19 bp, Homo sapiens
  source 1..19: mol_type = genomic DNA
aatcctgccgactacgcca

SEQ ID NO: 57232 - DNA, 32 bp, Homo sapiens; identical to SEQ ID NO: 42246
  source 1..32: mol_type = genomic DNA

SEQ ID NO: 57233 - DNA, 17 bp, Homo sapiens
  source 1..17: mol_type = genomic DNA
cccatatggtctagcgg

SEQ ID NO: 57234 - DNA, 36 bp, Homo sapiens; identical to SEQ ID NO: 11790
  source 1..36: mol_type = genomic DNA

SEQ ID NO: 57235 - DNA, 20 bp, Homo sapiens
  source 1..20: mol_type = genomic DNA
tacgaccccttatttacccc

SEQ ID NO: 57236 - DNA, 28 bp, Homo sapiens
  source 1..28: mol_type = genomic DNA
ggggatgtagctcagtggtagagcgcgc

SEQ ID NO: 57237 - DNA, 33 bp, Homo sapiens; identical to SEQ ID NO: 22518
  source 1..33: mol_type = genomic DNA

SEQ ID NO: 57238 - DNA, 21 bp, Homo sapiens
  source 1..21: mol_type = genomic DNA
gcggcccgggttcgattcccg

SEQ ID NO: 57239 - DNA, 39 bp, Homo sapiens; identical to SEQ ID NO: 17808
  source 1..39: mol_type = genomic DNA

SEQ ID NO: 57240 - DNA, 37 bp, Homo sapiens; identical to SEQ ID NO: 19938
  source 1..37: mol_type = genomic DNA

SEQ ID NO: 57241 - DNA, 20 bp, Homo sapiens
  source 1..20: mol_type = genomic DNA
tcgaatcccagtagagcctc

SEQ ID NO: 57242 - DNA, 19 bp, Homo sapiens
  source 1..19: mol_type = genomic DNA
ggccggttagctcagttgg

SEQ ID NO: 57243 - DNA, 17 bp, Homo sapiens
  source 1..17: mol_type = genomic DNA
tagtcgtggccgagtgg

SEQ ID NO: 57244 - DNA, 41 bp, Homo sapiens; identical to SEQ ID NO: 18202
  source 1..41: mol_type = genomic DNA

SEQ ID NO: 57245 - DNA, 28 bp, Homo sapiens
  source 1..28: mol_type = genomic DNA
ttgagggttcgaatcccttcgtggttgc

SEQ ID NO: 57246 - DNA, 21 bp, Homo sapiens
  source 1..21: mol_type = genomic DNA
gtttccgtagtgtagtggtca

SEQ ID NO: 57247 - DNA, 36 bp, Homo sapiens; identical to SEQ ID NO: 24045
  source 1..36: mol_type = genomic DNA

SEQ ID NO: 57248 - DNA, 26 bp, Homo sapiens
  source 1..26: mol_type = genomic DNA
gggttcgactcccggtgtgggaacca

SEQ ID NO: 57249 - DNA, 47 bp, Homo sapiens; identical to SEQ ID NO: 9935
  source 1..47: mol_type = genomic DNA

SEQ ID NO: 57250 - DNA, 37 bp, Homo sapiens; identical to SEQ ID NO: 19699
  source 1..37: mol_type = genomic DNA

SEQ ID NO: 57251 - DNA, 22 bp, Homo sapiens
  source 1..22: mol_type = genomic DNA
tagagcatgagactcttaatct

SEQ ID NO: 57252 - DNA, 20 bp, Homo sapiens
  source 1..20: mol_type = genomic DNA
agtggttagtactctgcgtt

SEQ ID NO: 57253 - DNA, 17 bp, Homo sapiens
  source 1..17: mol_type = genomic DNA
accgggcggaaacacca

SEQ ID NO: 57254 - DNA, 41 bp, Homo sapiens; identical to SEQ ID NO: 12419
  source 1..41: mol_type = genomic DNA

SEQ ID NO: 57255 - DNA, 32 bp, Homo sapiens; identical to SEQ ID NO: 12458
  source 1..32: mol_type = genomic DNA

SEQ ID NO: 57256 - DNA, 32 bp, Homo sapiens; identical to SEQ ID NO: 17569
  source 1..32: mol_type = genomic DNA

SEQ ID NO: 57257 - DNA, 26 bp, Homo sapiens
  source 1..26: mol_type = genomic DNA
tcaacttaacttgaccgctctgacca

SEQ ID NO: 57258 - DNA, 17 bp, Homo sapiens
  source 1..17: mol_type = genomic DNA
tcctgctcacagcgcca

SEQ ID NO: 57259 - DNA, 16 bp, Homo sapiens
  source 1..16: mol_type = genomic DNA
cctgctcacagcgcca

SEQ ID NO: 57260 - DNA, 16 bp, Homo sapiens
  source 1..16: mol_type = genomic DNA
ccctgctcgctgcgcc

SEQ ID NO: 57261 - DNA, 19 bp, Homo sapiens
  source 1..19: mol_type = genomic DNA
aagtcacgtcggggtcacc

SEQ ID NO: 57262 - DNA, 23 bp, Homo sapiens
  source 1..23: mol_type = genomic DNA
ggttcaagtccctgttcgggcgc

SEQ ID NO: 57263 - DNA, 21 bp, Homo sapiens
  source 1..21: mol_type = genomic DNA
aggtggcccgggttcgactcc

SEQ ID NO: 57264 - DNA, 45 bp, Homo sapiens; identical to SEQ ID NO: 32206
  source 1..45: mol_type = genomic DNA

SEQ ID NO: 57265 - DNA, 34 bp, Homo sapiens; identical to SEQ ID NO: 5860
  source 1..34: mol_type = genomic DNA

SEQ ID NO: 57266 - DNA, 42 bp, Homo sapiens; identical to SEQ ID NO: 41602
  source 1..42: mol_type = genomic DNA

SEQ ID NO: 57267 - DNA, 18 bp, Homo sapiens
  source 1..18: mol_type = genomic DNA
ttcaggtcgcagtctccc

SEQ ID NO: 57268 - DNA, 23 bp, Homo sapiens
  source 1..23: mol_type = genomic DNA
atggttagcactctggactctga

SEQ ID NO: 57269 - DNA, 23 bp, Homo sapiens
  source 1..23: mol_type = genomic DNA
ttgggtgcgagaggtcccgggtt

SEQ ID NO: 57270 - DNA, 27 bp, Homo sapiens
  source 1..27: mol_type = genomic DNA
cgcgggttcgatccccgtacgggccac

SEQ ID NO: 57271 - DNA, 46 bp, Homo sapiens; identical to SEQ ID NO: 7964
  source 1..46: mol_type = genomic DNA

SEQ ID NO: 57272 - DNA, 39 bp, Homo sapiens; identical to SEQ ID NO: 8314
  source 1..39: mol_type = genomic DNA

SEQ ID NO: 57273 - DNA, 47 bp, Homo sapiens; identical to SEQ ID NO: 8258
  source 1..47: mol_type = genomic DNA

SEQ ID NO: 57274 - DNA, 21 bp, Homo sapiens
  source 1..21: mol_type = genomic DNA
tcgaatcccaccgctgccacc

SEQ ID NO: 57275 - DNA, 22 bp, Homo sapiens
  source 1..22: mol_type = genomic DNA
aagattgagggttcgagtccct

SEQ ID NO: 57276 - DNA, 29 bp, Homo sapiens
  source 1..29: mol_type = genomic DNA
cactctggactttgaatccagcgatccga

SEQ ID NO: 57277 - DNA, 31 bp, Homo sapiens; identical to SEQ ID NO: 38652
  source 1..31: mol_type = genomic DNA

SEQ ID NO: 57278 - DNA, 33 bp, Homo sapiens; identical to SEQ ID NO: 20345
  source 1..33: mol_type = genomic DNA

SEQ ID NO: 57279 - DNA, 34 bp, Homo sapiens; identical to SEQ ID NO: 30117
  source 1..34: mol_type = genomic DNA

SEQ ID NO: 57280 - DNA, 18 bp, Homo sapiens
  source 1..18: mol_type = genomic DNA
acttgaccgctctgacca

SEQ ID NO: 57281 - DNA, 17 bp, Homo sapiens
  source 1..17: mol_type = genomic DNA
ccctgctcgctgcgcca

SEQ ID NO: 57282 - DNA, 30 bp, Homo sapiens; identical to SEQ ID NO: 25296
  source 1..30: mol_type = genomic DNA

SEQ ID NO: 57283 - DNA, 25 bp, Homo sapiens
  source 1..25: mol_type = genomic DNA
tcggctgttaaccgaaaggttggtg

SEQ ID NO: 57284 - DNA, 22 bp, Homo sapiens
  source 1..22: mol_type = genomic DNA
tccccgcgcaggttcgaatcct

SEQ ID NO: 57285 - DNA, 38 bp, Homo sapiens; identical to SEQ ID NO: 2930
  source 1..38: mol_type = genomic DNA

SEQ ID NO: 57286 - DNA, 27 bp, Homo sapiens
  source 1..27: mol_type = genomic DNA
cggttaggattcctggttttcacccag

SEQ ID NO: 57287 - DNA, 18 bp, Homo sapiens
  source 1..18: mol_type = genomic DNA
aatcctgctcacagcgcc

SEQ ID NO: 57288 - DNA, 30 bp, Homo sapiens; identical to SEQ ID NO: 14908
  source 1..30: mol_type = genomic DNA

SEQ ID NO: 57289 - DNA, 45 bp, Homo sapiens; identical to SEQ ID NO: 4700
  source 1..45: mol_type = genomic DNA

SEQ ID NO: 57290 - DNA, 32 bp, Homo sapiens; identical to SEQ ID NO: 5157
  source 1..32: mol_type = genomic DNA

SEQ ID NO: 57291 - DNA, 32 bp, Homo sapiens; identical to SEQ ID NO: 8715
  source 1..32: mol_type = genomic DNA

SEQ ID NO: 57292 - DNA, 37 bp, Homo sapiens; identical to SEQ ID NO: 8944
  source 1..37: mol_type = genomic DNA

SEQ ID NO: 57293 - DNA, 25 bp, Homo sapiens
  source 1..25: mol_type = genomic DNA
cgtgttcaaatcacgtcggggtcac

SEQ ID NO: 57294 - DNA, 37 bp, Homo sapiens; identical to SEQ ID NO: 36634
  source 1..37: mol_type = genomic DNA

SEQ ID NO: 57295 - DNA, 21 bp, Homo sapiens
  source 1..21: mol_type = genomic DNA
gcaatggtagcgcgtctgact

SEQ ID NO: 57296 - DNA, 43 bp, Homo sapiens; identical to SEQ ID NO: 41033
  source 1..43: mol_type = genomic DNA

SEQ ID NO: 57297 - DNA, 26 bp, Homo sapiens
  source 1..26: mol_type = genomic DNA
gtgatcgtatagtggttagtactctg

SEQ ID NO: 57298 - DNA, 26 bp, Homo sapiens
  source 1..26: mol_type = genomic DNA
cgtgatcgtatagtggttagtactct

SEQ ID NO: 57299 - DNA, 18 bp, Homo sapiens
  source 1..18: mol_type = genomic DNA
tggtagaattctcgcctg

SEQ ID NO: 57300 - DNA, 22 bp, Homo sapiens
  source 1..22: mol_type = genomic DNA
aatggttagcactctggactct

SEQ ID NO: 57301 - DNA, 30 bp, Homo sapiens; identical to SEQ ID NO: 18658
  source 1..30: mol_type = genomic DNA

SEQ ID NO: 57302 - DNA, 18 bp, Homo sapiens
  source 1..18: mol_type = genomic DNA
gtggttatcacgttcgcc

SEQ ID NO: 57303 - DNA, 18 bp, Homo sapiens
  source 1..18: mol_type = genomic DNA
ggctagctcagtcggtag

SEQ ID NO: 57304 - DNA, 27 bp, Homo sapiens
  source 1..27: mol_type = genomic DNA
ctccgaggtgattttcatattgaattg

SEQ ID NO: 57305 - DNA, 28 bp, Homo sapiens
  source 1..28: mol_type = genomic DNA
gggggtgtagctcagtggtagagcgcgt

SEQ ID NO: 57306 - DNA, 37 bp, Homo sapiens; identical to SEQ ID NO: 25707
  source 1..37: mol_type = genomic DNA

SEQ ID NO: 57307 - DNA, 29 bp, Homo sapiens
  source 1..29: mol_type = genomic DNA
ctgcgtgttcgaatcacgtcggggtcacc

SEQ ID NO: 57308 - DNA, 22 bp, Homo sapiens
  source 1..22: mol_type = genomic DNA
ttcaaatcacgtcggggtcacc

SEQ ID NO: 57309 - DNA, 24 bp, Homo sapiens
  source 1..24: mol_type = genomic DNA
cagtggtagaattctcgcctgcca

SEQ ID NO: 57310 - DNA, 39 bp, Homo sapiens; identical to SEQ ID NO: 3177
  source 1..39: mol_type = genomic DNA

SEQ ID NO: 57311 - DNA, 17 bp, Homo sapiens
  source 1..17: mol_type = genomic DNA
gtggtatcatgcaagat

SEQ ID NO: 57312 - DNA, 46 bp, Homo sapiens; identical to SEQ ID NO: 10365
  source 1..46: mol_type = genomic DNA

SEQ ID NO: 57313 - DNA, 42 bp, Homo sapiens; identical to SEQ ID NO: 19943
  source 1..42: mol_type = genomic DNA

SEQ ID NO: 57314 - DNA, 21 bp, Homo sapiens
  source 1..21: mol_type = genomic DNA
gtcggtagagcatgagactct

SEQ ID NO: 57315 - DNA, 29 bp, Homo sapiens
  source 1..29: mol_type = genomic DNA
cctggtggtctagtggttaggattcggcg

SEQ ID NO: 57316 - DNA, 19 bp, Homo sapiens
  source 1..19: mol_type = genomic DNA
attgcaggttcgagtcctg

SEQ ID NO: 57317 - DNA, 26 bp, Homo sapiens
  source 1..26: mol_type = genomic DNA
ttaaccgaaaggttggtggttcgagc

SEQ ID NO: 57318 - DNA, 24 bp, Homo sapiens
  source 1..24: mol_type = genomic DNA
gtctagtggttaggattcggcgct

SEQ ID NO: 57319 - DNA, 32 bp, Homo sapiens; identical to SEQ ID NO: 8225
  source 1..32: mol_type = genomic DNA

SEQ ID NO: 57320 - DNA, 29 bp, Homo sapiens
  source 1..29: mol_type = genomic DNA
gtttccgtagtgtagcggttatcacattc

SEQ ID NO: 57321 - DNA, 19 bp, Homo sapiens
  source 1..19: mol_type = genomic DNA
cagtggtagaattctcgcc

SEQ ID NO: 57322 - DNA, 24 bp, Homo sapiens
  source 1..24: mol_type = genomic DNA
gtgtagtggttatcacgttcgcct

SEQ ID NO: 57323 - DNA, 28 bp, Homo sapiens
  source 1..28: mol_type = genomic DNA
ttggtggttcagtggtagaattctcgcc

SEQ ID NO: 57324 - DNA, 18 bp, Homo sapiens
  source 1..18: mol_type = genomic DNA
gcgtggccgagcggtcta

SEQ ID NO: 57325 - DNA, 22 bp, Homo sapiens
  source 1..22: mol_type = genomic DNA
gggttcgattccccgacgggga

SEQ ID NO: 57326 - DNA, 26 bp, Homo sapiens
  source 1..26: mol_type = genomic DNA
tcggtagagcatgggactcttaatcc

SEQ ID NO: 57327 - DNA, 32 bp, Homo sapiens; identical to SEQ ID NO: 18449
  source 1..32: mol_type = genomic DNA

SEQ ID NO: 57328 - DNA, 23 bp, Homo sapiens
  source 1..23: mol_type = genomic DNA
tcagtggtagaattctcgcctgc

SEQ ID NO: 57329 - DNA, 21 bp, Homo sapiens
  source 1..21: mol_type = genomic DNA
gcttcaaacctgccggggctt

SEQ ID NO: 57330 - DNA, 23 bp, Homo sapiens
  source 1..23: mol_type = genomic DNA
ccggatagctcagtcggtagagc

SEQ ID NO: 57331 - DNA, 17 bp, Homo sapiens
  source 1..17: mol_type = genomic DNA
aggattcggcgctctca

SEQ ID NO: 57332 - DNA, 25 bp, Homo sapiens
  source 1..25: mol_type = genomic DNA
gtggcgcagcggaagcgtgctgggc

SEQ ID NO: 57333 - DNA, 33 bp, Homo sapiens; identical to SEQ ID NO: 16890
  source 1..33: mol_type = genomic DNA

SEQ ID NO: 57334 - DNA, 25 bp, Homo sapiens
  source 1..25: mol_type = genomic DNA
gtgtagtggttatcacgttcgcctc

SEQ ID NO: 57335 - DNA, 19 bp, Homo sapiens
  source 1..19: mol_type = genomic DNA
cagtcggtagagcatggga

SEQ ID NO: 57336 - DNA, 23 bp, Homo sapiens
  source 1..23: mol_type = genomic DNA
actttgaatccagcgatccgagt

SEQ ID NO: 57337 - DNA, 36 bp, Homo sapiens; identical to SEQ ID NO: 27564
  source 1..36: mol_type = genomic DNA

SEQ ID NO: 57338 - DNA, 18 bp, Homo sapiens
  source 1..18: mol_type = genomic DNA
gtggtagagcatttgact

SEQ ID NO: 57339 - DNA, 40 bp, Homo sapiens; identical to SEQ ID NO: 8315
  source 1..40: mol_type = genomic DNA

SEQ ID NO: 57340 - DNA, 21 bp, Homo sapiens
  source 1..21: mol_type = genomic DNA
tcagtcggtagagcatgggac

SEQ ID NO: 57341 - DNA, 27 bp, Homo sapiens
  source 1..27: mol_type = genomic DNA
gttcagtggtagaattctcgcctgcca

SEQ ID NO: 57342 - DNA, 17 bp, Homo sapiens
  source 1..17: mol_type = genomic DNA
agactttttctctgacc

SEQ ID NO: 57343 - DNA, 22 bp, Homo sapiens
  source 1..22: mol_type = genomic DNA
tgaatccagcgatccgagttca

SEQ ID NO: 57344 - DNA, 27 bp, Homo sapiens
  source 1..27: mol_type = genomic DNA
tcgtggttgtagtccgtgcgagaatac

SEQ ID NO: 57345 - DNA, 19 bp, Homo sapiens
  source 1..19: mol_type = genomic DNA
actctggactctgaatcca

SEQ ID NO: 57346 - DNA, 22 bp, Homo sapiens
  source 1..22: mol_type = genomic DNA
agtggtagaattctcgcctgcc

SEQ ID NO: 57347 - DNA, 35 bp, Homo sapiens; identical to SEQ ID NO: 16852
  source 1..35: mol_type = genomic DNA

SEQ ID NO: 57348 - DNA, 18 bp, Homo sapiens
  source 1..18: mol_type = genomic DNA
cagtggtagaattctcgc

SEQ ID NO: 57349 - DNA, 33 bp, Homo sapiens; identical to SEQ ID NO: 30462
  source 1..33: mol_type = genomic DNA

SEQ ID NO: 57350 - DNA, 23 bp, Homo sapiens
  source 1..23: mol_type = genomic DNA
ccataacccagaggtcgatggat

SEQ ID NO: 57351 - DNA, 35 bp, Homo sapiens; identical to SEQ ID NO: 4153
  source 1..35: mol_type = genomic DNA

SEQ ID NO: 57352 - DNA, 31 bp, Homo sapiens; identical to SEQ ID NO: 2233
  source 1..31: mol_type = genomic DNA

SEQ ID NO: 57353 - DNA, 23 bp, Homo sapiens
  source 1..23: mol_type = genomic DNA
agcagcttcaaacctgccggggc

SEQ ID NO: 57354 - DNA, 27 bp, Homo sapiens
  source 1..27: mol_type = genomic DNA
ggtggttcagtggtagaattctcgcct

SEQ ID NO: 57355 - DNA, 21 bp, Homo sapiens
  source 1..21: mol_type = genomic DNA
tcagtcggtagagcatcagac

SEQ ID NO: 57356 - DNA, 23 bp, Homo sapiens
  source 1..23: mol_type = genomic DNA
gttcagtggtagaattctcgcct

SEQ ID NO: 57357 - DNA, 19 bp, Homo sapiens
  source 1..19: mol_type = genomic DNA
gtcggtagagcatgggact

SEQ ID NO: 57358 - DNA, 33 bp, Homo sapiens; identical to SEQ ID NO: 22493
  source 1..33: mol_type = genomic DNA

SEQ ID NO: 57359 - DNA, 26 bp, Homo sapiens
  source 1..26: mol_type = genomic DNA
agctcagtcggtagagcatgggactc

SEQ ID NO: 57360 - DNA, 25 bp, Homo sapiens
  source 1..25: mol_type = genomic DNA
acatggtctagcggttaggattcct

SEQ ID NO: 57361 - DNA, 19 bp, Homo sapiens
  source 1..19: mol_type = genomic DNA
gtagaattctcgcctgcca

SEQ ID NO: 57362 - DNA, 22 bp, Homo sapiens
  source 1..22: mol_type = genomic DNA
gtcaggatggccgagcggtcta

SEQ ID NO: 57363 - DNA, 28 bp, Homo sapiens
  source 1..28: mol_type = genomic DNA
tggtggagttaaagactttttctctgac

SEQ ID NO: 57364 - DNA, 26 bp, Homo sapiens
  source 1..26: mol_type = genomic DNA
gccgtgatcgtatagtggttagtact

SEQ ID NO: 57365 - DNA, 22 bp, Homo sapiens
  source 1..22: mol_type = genomic DNA
gtcaggatggccgagtggtcta

SEQ ID NO: 57366 - DNA, 22 bp, Homo sapiens
  source 1..22: mol_type = genomic DNA
tttccgtagtgtagtggtcatc

SEQ ID NO: 57367 - DNA, 17 bp, Homo sapiens
  source 1..17: mol_type = genomic DNA
tagaattctcgcctgcc

SEQ ID NO: 57368 - DNA, 31 bp, Homo sapiens; identical to SEQ ID NO: 25477
  source 1..31: mol_type = genomic DNA

SEQ ID NO: 57369 - DNA, 36 bp, Homo sapiens; identical to SEQ ID NO: 11014
  source 1..36: mol_type = genomic DNA

SEQ ID NO: 57370 - DNA, 25 bp, Homo sapiens
  source 1..25: mol_type = genomic DNA
tggtctagtggttaggattcggcgc

SEQ ID NO: 57371 - DNA, 33 bp, Homo sapiens; identical to SEQ ID NO: 25533
  source 1..33: mol_type = genomic DNA

SEQ ID NO: 57372 - DNA, 32 bp, Homo sapiens; identical to SEQ ID NO: 15365
  source 1..32: mol_type = genomic DNA

SEQ ID NO: 57373 - DNA, 21 bp, Homo sapiens
  source 1..21: mol_type = genomic DNA
tcagtggtagaattctcgcct

SEQ ID NO: 57374 - DNA, 25 bp, Homo sapiens
  source 1..25: mol_type = genomic DNA
ggagttaaagactttttctctgacc

SEQ ID NO: 57375 - DNA, 19 bp, Homo sapiens
  source 1..19: mol_type = genomic DNA
tcggtagagcatgggactc

SEQ ID NO: 57376 - DNA, 33 bp, Homo sapiens; identical to SEQ ID NO: 13256
  source 1..33: mol_type = genomic DNA

SEQ ID NO: 57377 - DNA, 18 bp, Homo sapiens
  source 1..18: mol_type = genomic DNA
tcagaaggctgcgtgttc

SEQ ID NO: 57378 - DNA, 18 bp, Homo sapiens
  source 1..18: mol_type = genomic DNA
gtcccacctggggtgcca

SEQ ID NO: 57379 - DNA, 27 bp, Homo sapiens
  source 1..27: mol_type = genomic DNA
gtcggtagagcatgggactcttaatcc

SEQ ID NO: 57380 - DNA, 18 bp, Homo sapiens
  source 1..18: mol_type = genomic DNA
aggatggccgagcggtct

SEQ ID NO: 57381 - DNA, 32 bp, Homo sapiens; identical to SEQ ID NO: 18195
  source 1..32: mol_type = genomic DNA

SEQ ID NO: 57382 - DNA, 26 bp, Homo sapiens
  source 1..26: mol_type = genomic DNA
ggagaccggggttcgattccccgacg

SEQ ID NO: 57383 - DNA, 16 bp, Homo sapiens
  source 1..16: mol_type = genomic DNA
ggtatgattctcgctt

SEQ ID NO: 57384 - DNA, 34 bp, Homo sapiens; identical to SEQ ID NO: 27562
  source 1..34: mol_type = genomic DNA

SEQ ID NO: 57385 - DNA, 25 bp, Homo sapiens
  source 1..25: mol_type = genomic DNA
tggtctaggggtatgattctcgctt

SEQ ID NO: 57386 - DNA, 16 bp, Homo sapiens
  source 1..16: mol_type = genomic DNA
cggtagagcatgggac

SEQ ID NO: 57387 - DNA, 25 bp, Homo sapiens
  source 1..25: mol_type = genomic DNA
gtagtcgtggccgagtggttaaggc

SEQ ID NO: 57388 - DNA, 25 bp, Homo sapiens
  source 1..25: mol_type = genomic DNA
cgtatagtggttagtactctgcgtt

SEQ ID NO: 57389 - DNA, 21 bp, Homo sapiens
  source 1..21: mol_type = genomic DNA
gtggtagaattctcgcctgcc

SEQ ID NO: 57390 - DNA, 36 bp, Homo sapiens; identical to SEQ ID NO: 16838
  source 1..36: mol_type = genomic DNA

SEQ ID NO: 57391 - DNA, 37 bp, Homo sapiens; identical to SEQ ID NO: 10522
  source 1..37: mol_type = genomic DNA

SEQ ID NO: 57392 - DNA, 17 bp, Homo sapiens
  source 1..17: mol_type = genomic DNA
tcggtagagcatgggac

SEQ ID NO: 57393 - DNA, 18 bp, Homo sapiens
  source 1..18: mol_type = genomic DNA
ggggatgtagctcagtgg

SEQ ID NO: 57394 - DNA, 20 bp, Homo sapiens
  source 1..20: mol_type = genomic DNA
cagtggtagaattctcgcct

SEQ ID NO: 57395 - DNA, 21 bp, Homo sapiens
  source 1..21: mol_type = genomic DNA
agcactctggactctgaatcc

SEQ ID NO: 57396 - DNA, 30 bp, Homo sapiens; identical to SEQ ID NO: 11496
  source 1..30: mol_type = genomic DNA

SEQ ID NO: 57397 - DNA, 27 bp, Homo sapiens
  source 1..27: mol_type = genomic DNA
ggtggagttaaagactttttctctgac

SEQ ID NO: 57398 - DNA, 18 bp, Homo sapiens
  source 1..18: mol_type = genomic DNA
cattcttgcgacccgggt

SEQ ID NO: 57399 - DNA, 29 bp, Homo sapiens
  source 1..29: mol_type = genomic DNA
tggtggagttaaagactttttctctgacc

SEQ ID NO: 57400 - DNA, 17 bp, Homo sapiens
  source 1..17: mol_type = genomic DNA
acatcagattgtgaatc

SEQ ID NO: 57401 - DNA, 23 bp, Homo sapiens
  source 1..23: mol_type = genomic DNA
agtggtagaattctcgcctgcca

SEQ ID NO: 57402 - DNA, 23 bp, Homo sapiens
  source 1..23: mol_type = genomic DNA
ctttgaatccagcgatccgagtt

SEQ ID NO: 57403 - DNA, 33 bp, Homo sapiens; identical to SEQ ID NO: 12208
  source 1..33: mol_type = genomic DNA

SEQ ID NO: 57404 - DNA, 19 bp, Homo sapiens
  source 1..19: mol_type = genomic DNA
tggttagtactctgcgttg

SEQ ID NO: 57405 - DNA, 21 bp, Homo sapiens
  source 1..21: mol_type = genomic DNA
gtcaggatggccgagcggtct

SEQ ID NO: 57406 - DNA, 20 bp, Homo sapiens
  source 1..20: mol_type = genomic DNA
cagtcggtagagcatgggac

SEQ ID NO: 57407 - DNA, 22 bp, Homo sapiens
  source 1..22: mol_type = genomic DNA
ttgtaaaccaggggtcgcgagt

SEQ ID NO: 57408 - DNA, 27 bp, Homo sapiens
  source 1..27: mol_type = genomic DNA
gagtggcgcagcggaagcgtgctgggc

SEQ ID NO: 57409 - DNA, 18 bp, Homo sapiens
  source 1..18: mol_type = genomic DNA
gtcggtagagcatgggac

SEQ ID NO: 57410 - DNA, 20 bp, Homo sapiens
  source 1..20: mol_type = genomic DNA
tcgaatcccatcctcgtcgc

SEQ ID NO: 57411 - DNA, 20 bp, Homo sapiens
  source 1..20: mol_type = genomic DNA
gtcggtagagcatgggactc

SEQ ID NO: 57412 - DNA, 28 bp, Homo sapiens
  source 1..28: mol_type = genomic DNA
ccggctagctcagtcggtagagcatggg

SEQ ID NO: 57413 - DNA, 32 bp, Homo sapiens; identical to SEQ ID NO: 17958
  source 1..32: mol_type = genomic DNA

SEQ ID NO: 57414 - DNA, 19 bp, Homo sapiens
  source 1..19: mol_type = genomic DNA
cctgtcacgcgggagaccg

SEQ ID NO: 57415 - DNA, 39 bp, Homo sapiens; identical to SEQ ID NO: 24832
  source 1..39: mol_type = genomic DNA

SEQ ID NO: 57416 - DNA, 16 bp, Homo sapiens
  source 1..16: mol_type = genomic DNA
agaaggctgcgtgttc

SEQ ID NO: 57417 - DNA, 16 bp, Homo sapiens
  source 1..16: mol_type = genomic DNA
gtcaggatggccgagt

SEQ ID NO: 57418 - DNA, 21 bp, Homo sapiens
  source 1..21: mol_type = genomic DNA
tcaaatcccggacgagccccc

SEQ ID NO: 57419 - DNA, 27 bp, Homo sapiens
  source 1..27: mol_type = genomic DNA
tatggtctagcggttaggattcctggt

SEQ ID NO: 57420 - DNA, 34 bp, Homo sapiens; identical to SEQ ID NO: 18702
  source 1..34: mol_type = genomic DNA

SEQ ID NO: 57421 - DNA, 24 bp, Homo sapiens
  source 1..24: mol_type = genomic DNA
ggctgttaaccgaaaggttggtgg

SEQ ID NO: 57422 - DNA, 17 bp, Homo sapiens
  source 1..17: mol_type = genomic DNA
catgggactcttcatcc

SEQ ID NO: 57423 - DNA, 22 bp, Homo sapiens
  source 1..22: mol_type = genomic DNA
cggaagcgtgctgggcccataa

SEQ ID NO: 57424 - DNA, 24 bp, Homo sapiens
  source 1..24: mol_type = genomic DNA
cctggtggtctagtggttaggatt

SEQ ID NO: 57425 - DNA, 38 bp, Homo sapiens; identical to SEQ ID NO: 9926
  source 1..38: mol_type = genomic DNA

SEQ ID NO: 57426 - DNA, 16 bp, Homo sapiens
  source 1..16: mol_type = genomic DNA
ccattcttgcgacccg

SEQ ID NO: 57427 - DNA, 24 bp, Homo sapiens
  source 1..24: mol_type = genomic DNA
tggttaggattcggcgctctcacc

SEQ ID NO: 57428 - DNA, 18 bp, Homo sapiens
  source 1..18: mol_type = genomic DNA
gtatagtggttagtactc

SEQ ID NO: 57429 - DNA, 30 bp, Homo sapiens; identical to SEQ ID NO: 12384
  source 1..30: mol_type = genomic DNA

SEQ ID NO: 57430 - DNA, 37 bp, Homo sapiens; identical to SEQ ID NO: 919
  source 1..37: mol_type = genomic DNA

SEQ ID NO: 57431 - DNA, 33 bp, Homo sapiens; identical to SEQ ID NO: 16633
  source 1..33: mol_type = genomic DNA

SEQ ID NO: 57432 - DNA, 32 bp, Homo sapiens; identical to SEQ ID NO: 17006
  source 1..32: mol_type = genomic DNA

SEQ ID NO: 57433 - DNA, 46 bp, Homo sapiens; identical to SEQ ID NO: 14304
  source 1..46: mol_type = genomic DNA

SEQ ID NO: 57434 - DNA, 29 bp, Homo sapiens
  source 1..29: mol_type = genomic DNA
ggtccccggttcgaaaccgggcggaaaca

SEQ ID NO: 57435 - DNA, 34 bp, Homo sapiens; identical to SEQ ID NO: 20146
  source 1..34: mol_type = genomic DNA

SEQ ID NO: 57436 - DNA, 33 bp, Homo sapiens; identical to SEQ ID NO: 25909
  source 1..33: mol_type = genomic DNA

SEQ ID NO: 57437 - DNA, 19 bp, Homo sapiens
  source 1..19: mol_type = genomic DNA
gtttatgtagcttacctcc

SEQ ID NO: 57438 - DNA, 30 bp, Homo sapiens; identical to SEQ ID NO: 5130
  source 1..30: mol_type = genomic DNA

SEQ ID NO: 57439 - DNA, 24 bp, Homo sapiens
  source 1..24: mol_type = genomic DNA
tggggattgtgggttcgagtccca

SEQ ID NO: 57440 - DNA, 39 bp, Homo sapiens; identical to SEQ ID NO: 2259
  source 1..39: mol_type = genomic DNA

SEQ ID NO: 57441 - DNA, 31 bp, Homo sapiens; identical to SEQ ID NO: 18467
  source 1..31: mol_type = genomic DNA

SEQ ID NO: 57442 - DNA, 18 bp, Homo sapiens
  source 1..18: mol_type = genomic DNA
cttccaagcagttgaccc

SEQ ID NO: 57443 - DNA, 23 bp, Homo sapiens
  source 1..23: mol_type = genomic DNA
gctagctcagtcggtagagcatg

SEQ ID NO: 57444 - DNA, 37 bp, Homo sapiens; identical to SEQ ID NO: 6703
  source 1..37: mol_type = genomic DNA

SEQ ID NO: 57445 - DNA, 21 bp, Homo sapiens
  source 1..21: mol_type = genomic DNA
agaggtcgatggatcgaaacc

SEQ ID NO: 57446 - DNA, 37 bp, Homo sapiens; identical to SEQ ID NO: 7459
  source 1..37: mol_type = genomic DNA

SEQ ID NO: 57447 - DNA, 32 bp, Homo sapiens; identical to SEQ ID NO: 18754
  source 1..32: mol_type = genomic DNA

SEQ ID NO: 57448 - DNA, 41 bp, Homo sapiens; identical to SEQ ID NO: 23029
  source 1..41: mol_type = genomic DNA

SEQ ID NO: 57449 - DNA, 22 bp, Homo sapiens
  source 1..22: mol_type = genomic DNA
ctcagtggtagagcatttgact

SEQ ID NO: 57450 - DNA, 37 bp, Homo sapiens; identical to SEQ ID NO: 6717
  source 1..37: mol_type = genomic DNA

SEQ ID NO: 57451 - DNA, 33 bp, Homo sapiens; identical to SEQ ID NO: 17002
  source 1..33: mol_type = genomic DNA

SEQ ID NO: 57452 - DNA, 19 bp, Homo sapiens
  source 1..19: mol_type = genomic DNA
agcatgggactcttcatcc

SEQ ID NO: 57453 - DNA, 37 bp, Homo sapiens; identical to SEQ ID NO: 7569
  source 1..37: mol_type = genomic DNA

SEQ ID NO: 57454 - DNA, 25 bp, Homo sapiens
  source 1..25: mol_type = genomic DNA
attcggcgctctcaccgccgcggcc

SEQ ID NO: 57455 - DNA, 17 bp, Homo sapiens
  source 1..17: mol_type = genomic DNA
agggatgggttcgattc

SEQ ID NO: 57456 - DNA, 26 bp, Homo sapiens
  source 1..26: mol_type = genomic DNA
aggcggcccgggttcgactcccggtg

SEQ ID NO: 57457 - DNA, 36 bp, Homo sapiens; identical to SEQ ID NO: 29983
  source 1..36: mol_type = genomic DNA

SEQ ID NO: 57458 - DNA, 37 bp, Homo sapiens; identical to SEQ ID NO: 6724
  source 1..37: mol_type = genomic DNA

SEQ ID NO: 57459 - DNA, 22 bp, Homo sapiens
  source 1..22: mol_type = genomic DNA
ggttcagtggtagaattctcgc

SEQ ID NO: 57460 - DNA, 26 bp, Homo sapiens
  source 1..26: mol_type = genomic DNA
ggagaccggggttcgattccccgacg

SEQ ID NO: 57461 - DNA, 32 bp, Homo sapiens; identical to SEQ ID NO: 12011
  source 1..32: mol_type = genomic DNA

SEQ ID NO: 57462 - DNA, 22 bp, Homo sapiens
  source 1..22: mol_type = genomic DNA
gttcgatcctcacctggagcac

SEQ ID NO: 57463 - DNA, 22 bp, Homo sapiens
  source 1..22: mol_type = genomic DNA
atcgatgcccgcatcctccacc

SEQ ID NO: 57464 - DNA, 24 bp, Homo sapiens
  source 1..24: mol_type = genomic DNA
cggggttcgattccccgacgggga

SEQ ID NO: 57465 - DNA, 28 bp, Homo sapiens
  source 1..28: mol_type = genomic DNA
accttttaagttaaagattaagagaacc

SEQ ID NO: 57466 - DNA, 36 bp, Homo sapiens; identical to SEQ ID NO: 14082
  source 1..36: mol_type = genomic DNA

SEQ ID NO: 57467 - DNA, 32 bp, Homo sapiens; identical to SEQ ID NO: 15365
  source 1..32: mol_type = genomic DNA

SEQ ID NO: 57468 - DNA, 36 bp, Homo sapiens; identical to SEQ ID NO: 24716
  source 1..36: mol_type = genomic DNA

SEQ ID NO: 57469 - DNA, 35 bp, Homo sapiens; identical to SEQ ID NO: 24722
  source 1..35: mol_type = genomic DNA

SEQ ID NO: 57470 - DNA, 19 bp, Homo sapiens
  source 1..19: mol_type = genomic DNA
agtggttatcacgtctgct

SEQ ID NO: 57471 - DNA, 35 bp, Homo sapiens; identical to SEQ ID NO: 2917
  source 1..35: mol_type = genomic DNA

SEQ ID NO: 57472 - DNA, 37 bp, Homo sapiens; identical to SEQ ID NO: 26881
  source 1..37: mol_type = genomic DNA

SEQ ID NO: 57473 - DNA, 35 bp, Homo sapiens; identical to SEQ ID NO: 16416
  source 1..35: mol_type = genomic DNA

SEQ ID NO: 57474 - DNA, 32 bp, Homo sapiens; identical to SEQ ID NO: 18724
  source 1..32: mol_type = genomic DNA

SEQ ID NO: 57475 - DNA, 24 bp, Homo sapiens
  source 1..24: mol_type = genomic DNA
ggttagcactctggactctgaatc

SEQ ID NO: 57476 - DNA, 33 bp, Homo sapiens; identical to SEQ ID NO: 10094
  source 1..33: mol_type = genomic DNA

SEQ ID NO: 57477 - DNA, 35 bp, Homo sapiens; identical to SEQ ID NO: 26797
  source 1..35: mol_type = genomic DNA

SEQ ID NO: 57478 - DNA, 21 bp, Homo sapiens
  source 1..21: mol_type = genomic DNA
gtcggtagagcatgagactct

SEQ ID NO: 57479 - DNA, 25 bp, Homo sapiens
  source 1..25: mol_type = genomic DNA
ggttagcactctggactctgaatcc

SEQ ID NO: 57480 - DNA, 23 bp, Homo sapiens
  source 1..23: mol_type = genomic DNA
tggttcagtggtagaattctcgc

SEQ ID NO: 57481 - DNA, 34 bp, Homo sapiens; identical to SEQ ID NO: 36723
  source 1..34: mol_type = genomic DNA

SEQ ID NO: 57482 - DNA, 36 bp, Homo sapiens; identical to SEQ ID NO: 6716
  source 1..36: mol_type = genomic DNA

SEQ ID NO: 57483 - DNA, 30 bp, Homo sapiens; identical to SEQ ID NO: 1632
  source 1..30: mol_type = genomic DNA

SEQ ID NO: 57484 - DNA, 30 bp, Homo sapiens; identical to SEQ ID NO: 12456
  source 1..30: mol_type = genomic DNA

SEQ ID NO: 57485 - DNA, 43 bp, Homo sapiens; identical to SEQ ID NO: 36499
  source 1..43: mol_type = genomic DNA

SEQ ID NO: 57486 - DNA, 22 bp, Homo sapiens
  source 1..22: mol_type = genomic DNA
ctagcggttaggattcctggtt

SEQ ID NO: 57487 - DNA, 44 bp, Homo sapiens; identical to SEQ ID NO: 36500
  source 1..44: mol_type = genomic DNA

SEQ ID NO: 57488 - DNA, 17 bp, Homo sapiens
  source 1..17: mol_type = genomic DNA
ggccgtgatcgtatagt

SEQ ID NO: 57489 - DNA, 33 bp, Homo sapiens; identical to SEQ ID NO: 8581
  source 1..33: mol_type = genomic DNA

SEQ ID NO: 57490 - DNA, 36 bp, Homo sapiens; identical to SEQ ID NO: 20597
  source 1..36: mol_type = genomic DNA

SEQ ID NO: 57491 - DNA, 39 bp, Homo sapiens; identical to SEQ ID NO: 28285
  source 1..39: mol_type = genomic DNA

SEQ ID NO: 57492 - DNA, 24 bp, Homo sapiens
  source 1..24: mol_type = genomic DNA
gggttcaagtccctgtccaggcgc

SEQ ID NO: 57493 - DNA, 35 bp, Homo sapiens; identical to SEQ ID NO: 24715
  source 1..35: mol_type = genomic DNA

SEQ ID NO: 57494 - DNA, 17 bp, Homo sapiens
  source 1..17: mol_type = genomic DNA
aacgaatgatttcgact

SEQ ID NO: 57495 - DNA, 17 bp, Homo sapiens
  source 1..17: mol_type = genomic DNA
gtggcgcagcggaagcg

SEQ ID NO: 57496 - DNA, 22 bp, Homo sapiens
  source 1..22: mol_type = genomic DNA
agaggtcgatggatcgaaacca

SEQ ID NO: 57497 - DNA, 33 bp, Homo sapiens; identical to SEQ ID NO: 5168
  source 1..33: mol_type = genomic DNA

SEQ ID NO: 57498 - DNA, 35 bp, Homo sapiens; identical to SEQ ID NO: 17233
  source 1..35: mol_type = genomic DNA

SEQ ID NO: 57499 - DNA, 25 bp, Homo sapiens
  source 1..25: mol_type = genomic DNA
acgggttcgaaccccgtccgtgcct

SEQ ID NO: 57500 - DNA, 36 bp, Homo sapiens; identical to SEQ ID NO: 42451
  source 1..36: mol_type = genomic DNA

SEQ ID NO: 57501 - DNA, 27 bp, Homo sapiens
  source 1..27: mol_type = genomic DNA
tatagctcagtggtagagcatttgact

SEQ ID NO: 57502 - DNA, 17 bp, Homo sapiens
  source 1..17: mol_type = genomic DNA
ctctgcgttgtggccgc

SEQ ID NO: 57503 - DNA, 20 bp, Homo sapiens
  source 1..20: mol_type = genomic DNA
tcgaatccgagtcacggcac

SEQ ID NO: 57504 - DNA, 22 bp, Homo sapiens
  source 1..22: mol_type = genomic DNA
tcccacatggtctagcggttag

SEQ ID NO: 57505 - DNA, 29 bp, Homo sapiens
  source 1..29: mol_type = genomic DNA
atatggtctagcggttaggattcctggtt

SEQ ID NO: 57506 - DNA, 36 bp, Homo sapiens; identical to SEQ ID NO: 6702
  source 1..36: mol_type = genomic DNA

SEQ ID NO: 57507 - DNA, 36 bp, Homo sapiens; identical to SEQ ID NO: 24532
  source 1..36: mol_type = genomic DNA

SEQ ID NO: 57508 - DNA, 31 bp, Homo sapiens; identical to SEQ ID NO: 3852
  source 1..31: mol_type = genomic DNA

SEQ ID NO: 57509 - DNA, 40 bp, Homo sapiens; identical to SEQ ID NO: 19702
  source 1..40: mol_type = genomic DNA

SEQ ID NO: 57510 - DNA, 46 bp, Homo sapiens; identical to SEQ ID NO: 24605
  source 1..46: mol_type = genomic DNA

SEQ ID NO: 57511 - DNA, 36 bp, Homo sapiens; identical to SEQ ID NO: 10916
  source 1..36: mol_type = genomic DNA

SEQ ID NO: 57512 - DNA, 35 bp, Homo sapiens; identical to SEQ ID NO: 26765
  source 1..35: mol_type = genomic DNA

SEQ ID NO: 57513 - DNA, 36 bp, Homo sapiens; identical to SEQ ID NO: 24647
  source 1..36: mol_type = genomic DNA

SEQ ID NO: 57514 - DNA, 32 bp, Homo sapiens; identical to SEQ ID NO: 29841
  source 1..32: mol_type = genomic DNA

SEQ ID NO: 57515 - DNA, 18 bp, Homo sapiens
  source 1..18: mol_type = genomic DNA
ggggtatgattctcgctt

SEQ ID NO: 57516 - DNA, 26 bp, Homo sapiens
  source 1..26: mol_type = genomic DNA
gcggaagcgtgctgggcccataaccc

SEQ ID NO: 57517 - DNA, 22 bp, Homo sapiens
  source 1..22: mol_type = genomic DNA
gcagcgatggccgagtggttaa

SEQ ID NO: 57518 - DNA, 16 bp, Homo sapiens
  source 1..16: mol_type = genomic DNA
ggtgcgagaggtcccg

SEQ ID NO: 57519 - DNA, 27 bp, Homo sapiens
  source 1..27: mol_type = genomic DNA
tggttaggattcggcgctctcaccgcc

SEQ ID NO: 57520 - DNA, 26 bp, Homo sapiens
  source 1..26: mol_type = genomic DNA
tggtgtaatggtaagcactctggact

SEQ ID NO: 57521 - DNA, 37 bp, Homo sapiens; identical to SEQ ID NO: 29436
  source 1..37: mol_type = genomic DNA

SEQ ID NO: 57522 - DNA, 36 bp, Homo sapiens; identical to SEQ ID NO: 24720
  source 1..36: mol_type = genomic DNA

SEQ ID NO: 57523 - DNA, 24 bp, Homo sapiens
  source 1..24: mol_type = genomic DNA
aggttcgagtcctgccgcggtcgc

SEQ ID NO: 57524 - DNA, 35 bp, Homo sapiens; identical to SEQ ID NO: 33804
  source 1..35: mol_type = genomic DNA

SEQ ID NO: 57525 - DNA, 21 bp, Homo sapiens
  source 1..21: mol_type = genomic DNA
gcgttcgattcccggtcaggg

SEQ ID NO: 57526 - DNA, 19 bp, Homo sapiens
  source 1..19: mol_type = genomic DNA
gtcggtagagcatgggact

SEQ ID NO: 57527 - DNA, 16 bp, Homo sapiens
  source 1..16: mol_type = genomic DNA
ggccgtgatcgtatag

SEQ ID NO: 57528 - DNA, 42 bp, Homo sapiens; identical to SEQ ID NO: 9260
  source 1..42: mol_type = genomic DNA

SEQ ID NO: 57529 - DNA, 23 bp, Homo sapiens
  source 1..23: mol_type = genomic DNA
cataatctgaaggtcctgagttc

SEQ ID NO: 57530 - DNA, 35 bp, Homo sapiens; identical to SEQ ID NO: 16532
  source 1..35: mol_type = genomic DNA

SEQ ID NO: 57531 - DNA, 30 bp, Homo sapiens; identical to SEQ ID NO: 17335
  source 1..30: mol_type = genomic DNA

SEQ ID NO: 57532 - DNA, 22 bp, Homo sapiens
  source 1..22: mol_type = genomic DNA
tgaaaacctttttccaaggaca

SEQ ID NO: 57533 - DNA, 27 bp, Homo sapiens
  source 1..27: mol_type = genomic DNA
gccgctggtgtagtggtatcatgcaag

SEQ ID NO: 57534 - DNA, 35 bp, Homo sapiens; identical to SEQ ID NO: 8950
  source 1..35: mol_type = genomic DNA

SEQ ID NO: 57535 - DNA, 44 bp, Homo sapiens; identical to SEQ ID NO: 41748
  source 1..44: mol_type = genomic DNA

SEQ ID NO: 57536 - DNA, 33 bp, Homo sapiens; identical to SEQ ID NO: 15179
  source 1..33: mol_type = genomic DNA

SEQ ID NO: 57537 - DNA, 31 bp, Homo sapiens; identical to SEQ ID NO: 27918
  source 1..31: mol_type = genomic DNA

SEQ ID NO: 57538 - DNA, 34 bp, Homo sapiens; identical to SEQ ID NO: 8949
  source 1..34: mol_type = genomic DNA

SEQ ID NO: 57539 - DNA, 35 bp, Homo sapiens; identical to SEQ ID NO: 14222
  source 1..35: mol_type = genomic DNA

SEQ ID NO: 57540 - DNA, 22 bp, Homo sapiens
  source 1..22: mol_type = genomic DNA
gggggattagctcaaatggtag

SEQ ID NO: 57541 - DNA, 19 bp, Homo sapiens
  source 1..19: mol_type = genomic DNA
aaaccgggcggaaacacca

SEQ ID NO: 57542 - DNA, 35 bp, Homo sapiens; identical to SEQ ID NO: 17217
  source 1..35: mol_type = genomic DNA

SEQ ID NO: 57543 - DNA, 22 bp, Homo sapiens
  source 1..22: mol_type = genomic DNA
ggttgtagtccgtgcgagaata

SEQ ID NO: 57544 - DNA, 39 bp, Homo sapiens; identical to SEQ ID NO: 19701
  source 1..39: mol_type = genomic DNA

SEQ ID NO: 57545 - DNA, 21 bp, Homo sapiens
  source 1..21: mol_type = genomic DNA
gaggtggccgagtggttaagg

SEQ ID NO: 57546 - DNA, 16 bp, Homo sapiens
  source 1..16: mol_type = genomic DNA
cccggcccatgcacca

SEQ ID NO: 57547 - DNA, 34 bp, Homo sapiens; identical to SEQ ID NO: 8555
  source 1..34: mol_type = genomic DNA

SEQ ID NO: 57548 - DNA, 37 bp, Homo sapiens; identical to SEQ ID NO: 12157
  source 1..37: mol_type = genomic DNA

SEQ ID NO: 57549 - DNA, 27 bp, Homo sapiens
  source 1..27: mol_type = genomic DNA
aggcggcccgggttcgactcccggtgt

SEQ ID NO: 57550 - DNA, 28 bp, Homo sapiens
  source 1..28: mol_type = genomic DNA
gtttccgtagtgtagtggttatcacgtt

SEQ ID NO: 57551 - DNA, 34 bp, Homo sapiens; identical to SEQ ID NO: 2354
  source 1..34: mol_type = genomic DNA

SEQ ID NO: 57552 - DNA, 37 bp, Homo sapiens; identical to SEQ ID NO: 29434
  source 1..37: mol_type = genomic DNA

SEQ ID NO: 57553 - DNA, 24 bp, Homo sapiens
  source 1..24: mol_type = genomic DNA
atggatcgaaaccatcctctgcta

SEQ ID NO: 57554 - DNA, 29 bp, Homo sapiens
  source 1..29: mol_type = genomic DNA
gttccgggttcgagtcccggcggagtcgc

SEQ ID NO: 57555 - DNA, 18 bp, Homo sapiens
  source 1..18: mol_type = genomic DNA
aggtcgatggatcgaaac

SEQ ID NO: 57556 - DNA, 36 bp, Homo sapiens; identical to SEQ ID NO: 24650
  source 1..36: mol_type = genomic DNA

SEQ ID NO: 57557 - DNA, 22 bp, Homo sapiens
  source 1..22: mol_type = genomic DNA
gcccggatagctcagtcggtag

SEQ ID NO: 57558 - DNA, 21 bp, Homo sapiens
  source 1..21: mol_type = genomic DNA
tcaattccccgacggggagcc

SEQ ID NO: 57559 - DNA, 29 bp, Homo sapiens
  source 1..29: mol_type = genomic DNA
aaaatgttggttatacccttcccgtacta

SEQ ID NO: 57560 - DNA, 34 bp, Homo sapiens; identical to SEQ ID NO: 35653
  source 1..34: mol_type = genomic DNA

SEQ ID NO: 57561 - DNA, 34 bp, Homo sapiens; identical to SEQ ID NO: 40728
  source 1..34: mol_type = genomic DNA

SEQ ID NO: 57562 - DNA, 44 bp, Homo sapiens; identical to SEQ ID NO: 36502
  source 1..44: mol_type = genomic DNA

SEQ ID NO: 57563 - DNA, 34 bp, Homo sapiens; identical to SEQ ID NO: 24642
  source 1..34: mol_type = genomic DNA

SEQ ID NO: 57564 - DNA, 34 bp, Homo sapiens; identical to SEQ ID NO: 35413
  source 1..34: mol_type = genomic DNA

SEQ ID NO: 57565 - DNA, 22 bp, Homo sapiens
  source 1..22: mol_type = genomic DNA
tttccgtagtgtagtggtcatc

SEQ ID NO: 57566 - DNA, 33 bp, Homo sapiens; identical to SEQ ID NO: 8948
  source 1..33: mol_type = genomic DNA

SEQ ID NO: 57567 - DNA, 35 bp, Homo sapiens; identical to SEQ ID NO: 24649
  source 1..35: mol_type = genomic DNA

SEQ ID NO: 57568 - DNA, 22 bp, Homo sapiens
  source 1..22: mol_type = genomic DNA
ttgtagtccgtgcgagaatacc

SEQ ID NO: 57569 - DNA, 31 bp, Homo sapiens; identical to SEQ ID NO: 2233
  source 1..31: mol_type = genomic DNA

SEQ ID NO: 57570 - DNA, 30 bp, Homo sapiens; identical to SEQ ID NO: 25530
  source 1..30: mol_type = genomic DNA

SEQ ID NO: 57571 - DNA, 35 bp, Homo sapiens; identical to SEQ ID NO: 24531
  source 1..35: mol_type = genomic DNA

SEQ ID NO: 57572 - DNA, 36 bp, Homo sapiens; identical to SEQ ID NO: 26880
  source 1..36: mol_type = genomic DNA

SEQ ID NO: 57573 - DNA, 31 bp, Homo sapiens; identical to SEQ ID NO: 26040
  source 1..31: mol_type = genomic DNA

SEQ ID NO: 57574 - DNA, 41 bp, Homo sapiens; identical to SEQ ID NO: 28601
  source 1..41: mol_type = genomic DNA

SEQ ID NO: 57575 - DNA, 40 bp, Homo sapiens; identical to SEQ ID NO: 20625
  source 1..40: mol_type = genomic DNA

SEQ ID NO: 57576 - DNA, 36 bp, Homo sapiens; identical to SEQ ID NO: 24723
  source 1..36: mol_type = genomic DNA

SEQ ID NO: 57577 - DNA, 17 bp, Homo sapiens
  source 1..17: mol_type = genomic DNA
attcggcgctctcaccg

SEQ ID NO: 57578 - DNA, 31 bp, Homo sapiens; identical to SEQ ID NO: 13229
  source 1..31: mol_type = genomic DNA

SEQ ID NO: 57579 - DNA, 36 bp, Homo sapiens; identical to SEQ ID NO: 26869
  source 1..36: mol_type = genomic DNA

SEQ ID NO: 57580 - DNA, 22 bp, Homo sapiens
  source 1..22: mol_type = genomic DNA
ggggtgtagctcagtggtagag

SEQ ID NO: 57581 - DNA, 45 bp, Homo sapiens; identical to SEQ ID NO: 42950
  source 1..45: mol_type = genomic DNA

SEQ ID NO: 57582 - DNA, 19 bp, Homo sapiens
  source 1..19: mol_type = genomic DNA
atgtagctcagtggtagag

SEQ ID NO: 57583 - DNA, 34 bp, Homo sapiens; identical to SEQ ID NO: 40691
  source 1..34: mol_type = genomic DNA

SEQ ID NO: 57584 - DNA, 44 bp, Homo sapiens; identical to SEQ ID NO: 16226
  source 1..44: mol_type = genomic DNA

SEQ ID NO: 57585 - DNA, 33 bp, Homo sapiens; identical to SEQ ID NO: 10190
  source 1..33: mol_type = genomic DNA

SEQ ID NO: 57586 - DNA, 31 bp, Homo sapiens; identical to SEQ ID NO: 27987
  source 1..31: mol_type = genomic DNA

SEQ ID NO: 57587 - DNA, 18 bp, Homo sapiens
  source 1..18: mol_type = genomic DNA
cgaatctcggtgggacct

SEQ ID NO: 57588 - DNA, 20 bp, Homo sapiens
  source 1..20: mol_type = genomic DNA
cgattcccggtcagggaacc

SEQ ID NO: 57589 - DNA, 36 bp, Homo sapiens; identical to SEQ ID NO: 9937
  source 1..36: mol_type = genomic DNA

SEQ ID NO: 57590 - DNA, 27 bp, Homo sapiens
  source 1..27: mol_type = genomic DNA
gagatgaaaacctttttccaaggacac

SEQ ID NO: 57591 - DNA, 28 bp, Homo sapiens
  source 1..28: mol_type = genomic DNA
cccggctagctcagtcggtagagcatgg

SEQ ID NO: 57592 - DNA, 33 bp, Homo sapiens; identical to SEQ ID NO: 24938
  source 1..33: mol_type = genomic DNA

SEQ ID NO: 57593 - DNA, 29 bp, Homo sapiens
  source 1..29: mol_type = genomic DNA
cagagtggcgcagcggaagcgtgctgggc

SEQ ID NO: 57594 - DNA, 34 bp, Homo sapiens; identical to SEQ ID NO: 8012
  source 1..34: mol_type = genomic DNA

SEQ ID NO: 57595 - DNA, 23 bp, Homo sapiens
  source 1..23: mol_type = genomic DNA
atgaaaacctttttccaaggaca

SEQ ID NO: 57596 - DNA, 34 bp, Homo sapiens; identical to SEQ ID NO: 17232
  source 1..34: mol_type = genomic DNA

SEQ ID NO: 57597 - DNA, 36 bp, Homo sapiens; identical to SEQ ID NO: 918
  source 1..36: mol_type = genomic DNA

SEQ ID NO: 57598 - DNA, 34 bp, Homo sapiens; identical to SEQ ID NO: 8551
  source 1..34: mol_type = genomic DNA

SEQ ID NO: 57599 - DNA, 34 bp, Homo sapiens; identical to SEQ ID NO: 8006
  source 1..34: mol_type = genomic DNA

SEQ ID NO: 57600 - DNA, 19 bp, Homo sapiens
  source 1..19: mol_type = genomic DNA
cttaacttgaccgctctga

SEQ ID NO: 57601 - DNA, 16 bp, Homo sapiens
  source 1..16: mol_type = genomic DNA
agctatccattggtct

SEQ ID NO: 57602 - DNA, 45 bp, Homo sapiens; identical to SEQ ID NO: 3509
  source 1..45: mol_type = genomic DNA

SEQ ID NO: 57603 - DNA, 35 bp, Homo sapiens; identical to SEQ ID NO: 9089
  source 1..35: mol_type = genomic DNA

SEQ ID NO: 57604 - DNA, 35 bp, Homo sapiens; identical to SEQ ID NO: 29703
  source 1..35: mol_type = genomic DNA

SEQ ID NO: 57605 - DNA, 36 bp, Homo sapiens; identical to SEQ ID NO: 42926
  source 1..36: mol_type = genomic DNA

SEQ ID NO: 57606 - DNA, 22 bp, Homo sapiens
  source 1..22: mol_type = genomic DNA
tggtagaattctcgcctgccac

SEQ ID NO: 57607 - DNA, 28 bp, Homo sapiens
  source 1..28: mol_type = genomic DNA
agaagcagcttcaaacctgccggggctt

SEQ ID NO: 57608 - DNA, 35 bp, Homo sapiens; identical to SEQ ID NO: 8007
  source 1..35: mol_type = genomic DNA

SEQ ID NO: 57609 - DNA, 23 bp, Homo sapiens
  source 1..23: mol_type = genomic DNA
ggtgtaatggttagcactctgga

SEQ ID NO: 57610 - DNA, 33 bp, Homo sapiens; identical to SEQ ID NO: 24641
  source 1..33: mol_type = genomic DNA

SEQ ID NO: 57611 - DNA, 36 bp, Homo sapiens; identical to SEQ ID NO: 6723
  source 1..36: mol_type = genomic DNA

SEQ ID NO: 57612 - DNA, 17 bp, Homo sapiens
  source 1..17: mol_type = genomic DNA
gtctagtggttaggatt

SEQ ID NO: 57613 - DNA, 17 bp, Homo sapiens
  source 1..17: mol_type = genomic DNA
aggagatcctgggttcg

SEQ ID NO: 57614 - DNA, 35 bp, Homo sapiens; identical to SEQ ID NO: 10938
  source 1..35: mol_type = genomic DNA

SEQ ID NO: 57615 - DNA, 34 bp, Homo sapiens; identical to SEQ ID NO: 40650
  source 1..34: mol_type = genomic DNA

SEQ ID NO: 57616 - DNA, 37 bp, Homo sapiens; identical to SEQ ID NO: 26686
  source 1..37: mol_type = genomic DNA

SEQ ID NO: 57617 - DNA, 27 bp, Homo sapiens
  source 1..27: mol_type = genomic DNA
gggggtatagctcagtggtagagcatt

SEQ ID NO: 57618 - DNA, 18 bp, Homo sapiens
  source 1..18: mol_type = genomic DNA
tcgaaaccatcctctgct

SEQ ID NO: 57619 - DNA, 20 bp, Homo sapiens
  source 1..20: mol_type = genomic DNA
tcgatccccgtacgggccac

SEQ ID NO: 57620 - DNA, 21 bp, Homo sapiens
  source 1..21: mol_type = genomic DNA
cgattcccggccaacgcacca

SEQ ID NO: 57621 - DNA, 31 bp, Homo sapiens; identical to SEQ ID NO: 2705
  source 1..31: mol_type = genomic DNA

SEQ ID NO: 57622 - DNA, 20 bp, Homo sapiens
  source 1..20: mol_type = genomic DNA
gaggtcgatggatcgaaacc

SEQ ID NO: 57623 - DNA, 18 bp, Homo sapiens
  source 1..18: mol_type = genomic DNA
ggatagctcagtcggtag

SEQ ID NO: 57624 - DNA, 29 bp, Homo sapiens
  source 1..29: mol_type = genomic DNA
gaagaagcagcttcaaacctgccggggct

SEQ ID NO: 57625 - DNA, 43 bp, Homo sapiens; identical to SEQ ID NO: 17864
  source 1..43: mol_type = genomic DNA

SEQ ID NO: 57626 - DNA, 36 bp, Homo sapiens; identical to SEQ ID NO: 17065
  source 1..36: mol_type = genomic DNA

SEQ ID NO: 57627 - DNA, 36 bp, Homo sapiens; identical to SEQ ID NO: 26685
  source 1..36: mol_type = genomic DNA

SEQ ID NO: 57628 - DNA, 36 bp, Homo sapiens; identical to SEQ ID NO: 14075
  source 1..36: mol_type = genomic DNA

SEQ ID NO: 57629 - DNA, 34 bp, Homo sapiens; identical to SEQ ID NO: 37247
  source 1..34: mol_type = genomic DNA

SEQ ID NO: 57630 - DNA, 30 bp, Homo sapiens; identical to SEQ ID NO: 2232
  source 1..30: mol_type = genomic DNA

SEQ ID NO: 57631 - DNA, 36 bp, Homo sapiens; identical to SEQ ID NO: 16643
  source 1..36: mol_type = genomic DNA

SEQ ID NO: 57632 - DNA, 18 bp, Homo sapiens
  source 1..18: mol_type = genomic DNA
aggtcgtgagttcgagcc

SEQ ID NO: 57633 - DNA, 40 bp, Homo sapiens; identical to SEQ ID NO: 10297
  source 1..40: mol_type = genomic DNA

SEQ ID NO: 57634 - DNA, 34 bp, Homo sapiens; identical to SEQ ID NO: 17216
  source 1..34: mol_type = genomic DNA

SEQ ID NO: 57635 - DNA, 23 bp, Homo sapiens
  source 1..23: mol_type = genomic DNA
cgtggttgtagtccgtgcgagaa

SEQ ID NO: 57636 - DNA, 17 bp, Homo sapiens
  source 1..17: mol_type = genomic DNA
agtggtagaattctcgc

SEQ ID NO: 57637 - DNA, 19 bp, Homo sapiens
  source 1..19: mol_type = genomic DNA
cgattcccggccaacgcac

SEQ ID NO: 57638 - DNA, 36 bp, Homo sapiens; identical to SEQ ID NO: 39165
  source 1..36: mol_type = genomic DNA

SEQ ID NO: 57639 - DNA, 37 bp, Homo sapiens; identical to SEQ ID NO: 30923
  source 1..37: mol_type = genomic DNA

SEQ ID NO: 57640 - DNA, 21 bp, Homo sapiens
  source 1..21: mol_type = genomic DNA
aacttaacttgaccgctctga

SEQ ID NO: 57641 - DNA, 27 bp, Homo sapiens
  source 1..27: mol_type = genomic DNA
tcattggtcgtggttgtagtccgtgcg

SEQ ID NO: 57642 - DNA, 18 bp, Homo sapiens
  source 1..18: mol_type = genomic DNA
ccgaaaggttggtggttc

SEQ ID NO: 57643 - DNA, 20 bp, Homo sapiens
  source 1..20: mol_type = genomic DNA
tcgagtcctgccgcggtcgc

SEQ ID NO: 57644 - DNA, 23 bp, Homo sapiens
  source 1..23: mol_type = genomic DNA
accaggatggccgagtggttaag

SEQ ID NO: 57645 - DNA, 33 bp, Homo sapiens; identical to SEQ ID NO: 11630
  source 1..33: mol_type = genomic DNA

SEQ ID NO: 57646 - DNA, 34 bp, Homo sapiens; identical to SEQ ID NO: 8933
  source 1..34: mol_type = genomic DNA

SEQ ID NO: 57647 - DNA, 35 bp, Homo sapiens; identical to SEQ ID NO: 24537
  source 1..35: mol_type = genomic DNA

SEQ ID NO: 57648 - DNA, 18 bp, Homo sapiens
  source 1..18: mol_type = genomic DNA
agcatgggactcttaatc

SEQ ID NO: 57649 - DNA, 26 bp, Homo sapiens
  source 1..26: mol_type = genomic DNA
agccgtgatcgtatagtggttagtac

SEQ ID NO: 57650 - DNA, 17 bp, Homo sapiens
  source 1..17: mol_type = genomic DNA
ctcccggtgtgggaacc

SEQ ID NO: 57651 - DNA, 35 bp, Homo sapiens; identical to SEQ ID NO: 8582
  source 1..35: mol_type = genomic DNA

SEQ ID NO: 57652 - DNA, 35 bp, Homo sapiens; identical to SEQ ID NO: 24646
  source 1..35: mol_type = genomic DNA

SEQ ID NO: 57653 - DNA, 17 bp, Homo sapiens
  source 1..17: mol_type = genomic DNA
cgaaaccatcctctgct

SEQ ID NO: 57654 - DNA, 18 bp, Homo sapiens
  source 1..18: mol_type = genomic DNA
aatccgggtgccccctcc

SEQ ID NO: 57655 - DNA, 20 bp, Homo sapiens
  source 1..20: mol_type = genomic DNA
cgaatccgagtcacggcacc

SEQ ID NO: 57656 - DNA, 25 bp, Homo sapiens
  source 1..25: mol_type = genomic DNA
gctcagtcggtagagcatgggactc

SEQ ID NO: 57657 - DNA, 22 bp, Homo sapiens
  source 1..22: mol_type = genomic DNA
ggttcgaatcccaccgctgcca

SEQ ID NO: 57658 - DNA, 18 bp, Homo sapiens
  source 1..18: mol_type = genomic DNA
gattcccggtcagggaac

SEQ ID NO: 57659 - DNA, 45 bp, Homo sapiens; identical to SEQ ID NO: 35291
  source 1..45: mol_type = genomic DNA

SEQ ID NO: 57660 - DNA, 18 bp, Homo sapiens
  source 1..18: mol_type = genomic DNA
ggctcgttggtctagggg

SEQ ID NO: 57661 - DNA, 33 bp, Homo sapiens; identical to SEQ ID NO: 17231
  source 1..33: mol_type = genomic DNA

SEQ ID NO: 57662 - DNA, 16 bp, Homo sapiens
  source 1..16: mol_type = genomic DNA
tgagggtccagggttc

SEQ ID NO: 57663 - DNA, 41 bp, Homo sapiens; identical to SEQ ID NO: 3454
  source 1..41: mol_type = genomic DNA

SEQ ID NO: 57664 - DNA, 37 bp, Homo sapiens; identical to SEQ ID NO: 14083
  source 1..37: mol_type = genomic DNA

SEQ ID NO: 57665 - DNA, 33 bp, Homo sapiens; identical to SEQ ID NO: 11964
  source 1..33: mol_type = genomic DNA

SEQ ID NO: 57666 - DNA, 17 bp, Homo sapiens
  source 1..17: mol_type = genomic DNA
aatccgggtgccccctc

SEQ ID NO: 57667 - DNA, 44 bp, Homo sapiens; identical to SEQ ID NO: 30152
  source 1..44: mol_type = genomic DNA

SEQ ID NO: 57668 - DNA, 34 bp, Homo sapiens; identical to SEQ ID NO: 14594
  source 1..34: mol_type = genomic DNA

SEQ ID NO: 57669 - DNA, 23 bp, Homo sapiens
  source 1..23: mol_type = genomic DNA
gtttccgtagtgtagcggttatc

SEQ ID NO: 57670 - DNA, 28 bp, Homo sapiens
  source 1..28: mol_type = genomic DNA
ttcggcgctctcaccgccgcggcccggg

SEQ ID NO: 57671 - DNA, 20 bp, Homo sapiens
  source 1..20: mol_type = genomic DNA
attccggatcagaagattga

SEQ ID NO: 57672 - DNA, 34 bp, Homo sapiens; identical to SEQ ID NO: 11965
  source 1..34: mol_type = genomic DNA

SEQ ID NO: 57673 - DNA, 18 bp, Homo sapiens
  source 1..18: mol_type = genomic DNA
gatcccgggcggaaacac

SEQ ID NO: 57674 - DNA, 22 bp, Homo sapiens
  source 1..22: mol_type = genomic DNA
tcctcgttagtatagtggtgag

SEQ ID NO: 57675 - DNA, 36 bp, Homo sapiens; identical to SEQ ID NO: 42665
  source 1..36: mol_type = genomic DNA

SEQ ID NO: 57676 - DNA, 25 bp, Homo sapiens
  source 1..25: mol_type = genomic DNA
tggtctaggggtatgattctcgctt

SEQ ID NO: 57677 - DNA, 19 bp, Homo sapiens
  source 1..19: mol_type = genomic DNA
ggggatgtagctcagtggt

SEQ ID NO: 57678 - DNA, 17 bp, Homo sapiens
  source 1..17: mol_type = genomic DNA
ctttttccaaggacacc

SEQ ID NO: 57679 - DNA, 19 bp, Homo sapiens
  source 1..19: mol_type = genomic DNA
tgattctcggtttgggtcc

SEQ ID NO: 57680 - DNA, 20 bp, Homo sapiens
  source 1..20: mol_type = genomic DNA
ggatagctcagtcggtagag

SEQ ID NO: 57681 - DNA, 21 bp, Homo sapiens
  source 1..21: mol_type = genomic DNA
tcgagcctcacctggagcacc

SEQ ID NO: 57682 - DNA, 18 bp, Homo sapiens
  source 1..18: mol_type = genomic DNA
cgaatcccacttctgaca

SEQ ID NO: 57683 - DNA, 34 bp, Homo sapiens; identical to SEQ ID NO: 4971
  source 1..34: mol_type = genomic DNA

SEQ ID NO: 57684 - DNA, 35 bp, Homo sapiens; identical to SEQ ID NO: 11966
  source 1..35: mol_type = genomic DNA

SEQ ID NO: 57685 - DNA, 17 bp, Homo sapiens
  source 1..17: mol_type = genomic DNA
cgcattggacttctaat

SEQ ID NO: 57686 - DNA, 44 bp, Homo sapiens; identical to SEQ ID NO: 10204
  source 1..44: mol_type = genomic DNA

SEQ ID NO: 57687 - DNA, 44 bp, Homo sapiens; identical to SEQ ID NO: 13630
  source 1..44: mol_type = genomic DNA

SEQ ID NO: 57688 - DNA, 35 bp, Homo sapiens; identical to SEQ ID NO: 20587
  source 1..35: mol_type = genomic DNA

SEQ ID NO: 57689 - DNA, 36 bp, Homo sapiens; identical to SEQ ID NO: 26864
  source 1..36: mol_type = genomic DNA

SEQ ID NO: 57690 - DNA, 37 bp, Homo sapiens; identical to SEQ ID NO: 19699
  source 1..37: mol_type = genomic DNA

SEQ ID NO: 57691 - DNA, 27 bp, Homo sapiens
  source 1..27: mol_type = genomic DNA
gtgggtttaagtcccattggtctagcc

SEQ ID NO: 57692 - DNA, 17 bp, Homo sapiens
  source 1..17: mol_type = genomic DNA
gtttatgtagcttacct

SEQ ID NO: 57693 - DNA, 17 bp, Homo sapiens
  source 1..17: mol_type = genomic DNA
taggattcggcgctctc

SEQ ID NO: 57694 - DNA, 36 bp, Homo sapiens; identical to SEQ ID NO: 6259
  source 1..36: mol_type = genomic DNA

SEQ ID NO: 57695 - DNA, 47 bp, Homo sapiens; identical to SEQ ID NO: 8720
  source 1..47: mol_type = genomic DNA

SEQ ID NO: 57696 - DNA, 36 bp, Homo sapiens; identical to SEQ ID NO: 36662
  source 1..36: mol_type = genomic DNA

SEQ ID NO: 57697 - DNA, 16 bp, Homo sapiens
  source 1..16: mol_type = genomic DNA
tcaggatggccgagtg

SEQ ID NO: 57698 - DNA, 30 bp, Homo sapiens; identical to SEQ ID NO: 5165
  source 1..30: mol_type = genomic DNA

SEQ ID NO: 57699 - DNA, 27 bp, Homo sapiens
  source 1..27: mol_type = genomic DNA
tccgggttcgagtcccggcggagtcgc

SEQ ID NO: 57700 - DNA, 21 bp, Homo sapiens
  source 1..21: mol_type = genomic DNA
cggatagctcagtcggtagag

SEQ ID NO: 57701 - DNA, 16 bp, Homo sapiens
  source 1..16: mol_type = genomic DNA
aatccggctcgaagga

SEQ ID NO: 57702 - DNA, 19 bp, Homo sapiens
  source 1..19: mol_type = genomic DNA
ggtagaattctcgcctgcc

SEQ ID NO: 57703 - DNA, 34 bp, Homo sapiens; identical to SEQ ID NO: 35054
  source 1..34: mol_type = genomic DNA

SEQ ID NO: 57704 - DNA, 21 bp, Homo sapiens
  source 1..21: mol_type = genomic DNA
tagtggttatcacgttcgcct

SEQ ID NO: 57705 - DNA, 16 bp, Homo sapiens
  source 1..16: mol_type = genomic DNA
aaatgtttagacgggc

SEQ ID NO: 57706 - DNA, 32 bp, Homo sapiens; identical to SEQ ID NO: 5167
  source 1..32: mol_type = genomic DNA

SEQ ID NO: 57707 - DNA, 33 bp, Homo sapiens; identical to SEQ ID NO: 5217
  source 1..33: mol_type = genomic DNA

SEQ ID NO: 57708 - DNA, 33 bp, Homo sapiens; identical to SEQ ID NO: 24951
  source 1..33: mol_type = genomic DNA

SEQ ID NO: 57709 - DNA, 17 bp, Homo sapiens
  source 1..17: mol_type = genomic DNA
cggttaggattcctggt

SEQ ID NO: 57710 - DNA, 17 bp, Homo sapiens
  source 1..17: mol_type = genomic DNA
gcactctggactttgaa

SEQ ID NO: 57711 - DNA, 22 bp, Homo sapiens
  source 1..22: mol_type = genomic DNA
accaggatggccgagtggttaa

SEQ ID NO: 57712 - DNA, 20 bp, Homo sapiens
  source 1..20: mol_type = genomic DNA
caagtcacgtcggggtcacc

SEQ ID NO: 57713 - DNA, 19 bp, Homo sapiens
  source 1..19: mol_type = genomic DNA
ttgggtgcgagaggtcccg

SEQ ID NO: 57714 - DNA, 27 bp, Homo sapiens
  source 1..27: mol_type = genomic DNA
atggtctagcggttaggattcctggtt

SEQ ID NO: 57715 - DNA, 47 bp, Homo sapiens; identical to SEQ ID NO: 15057
  source 1..47: mol_type = genomic DNA

SEQ ID NO: 57716 - DNA, 34 bp, Homo sapiens; identical to SEQ ID NO: 18568
  source 1..34: mol_type = genomic DNA

SEQ ID NO: 57717 - DNA, 35 bp, Homo sapiens; identical to SEQ ID NO: 2800
  source 1..35: mol_type = genomic DNA

SEQ ID NO: 57718 - DNA, 34 bp, Homo sapiens; identical to SEQ ID NO: 8833
  source 1..34: mol_type = genomic DNA

SEQ ID NO: 57719 - DNA, 33 bp, Homo sapiens; identical to SEQ ID NO: 39346
  source 1..33: mol_type = genomic DNA

SEQ ID NO: 57720 - DNA, 36 bp, Homo sapiens; identical to SEQ ID NO: 42915
  source 1..36: mol_type = genomic DNA

SEQ ID NO: 57721 - DNA, 26 bp, Homo sapiens
  source 1..26: mol_type = genomic DNA
gagaaagctcacaagaactgctaact

SEQ ID NO: 57722 - DNA, 19 bp, Homo sapiens
  source 1..19: mol_type = genomic DNA
cggatagctcagtcggtag

SEQ ID NO: 57723 - DNA, 18 bp, Homo sapiens
  source 1..18: mol_type = genomic DNA
caagttctggtctccgga

SEQ ID NO: 57724 - DNA, 25 bp, Homo sapiens
  source 1..25: mol_type = genomic DNA
tggtgtagtggtatcatgcaagatt

SEQ ID NO: 57725 - DNA, 18 bp, Homo sapiens
  source 1..18: mol_type = genomic DNA
gttcaaatctcgctgggg

SEQ ID NO: 57726 - DNA, 24 bp, Homo sapiens
  source 1..24: mol_type = genomic DNA
agttcgagcctcacctggagcacc

SEQ ID NO: 57727 - DNA, 35 bp, Homo sapiens; identical to SEQ ID NO: 24643
  source 1..35: mol_type = genomic DNA

SEQ ID NO: 57728 - DNA, 16 bp, Homo sapiens
  source 1..16: mol_type = genomic DNA
ccggagatgaaaacct

SEQ ID NO: 57729 - DNA, 18 bp, Homo sapiens
  source 1..18: mol_type = genomic DNA
aattctcgctggggcctc

SEQ ID NO: 57730 - DNA, 18 bp, Homo sapiens
  source 1..18: mol_type = genomic DNA
agtggcgcagcggaagcg

SEQ ID NO: 57731 - DNA, 20 bp, Homo sapiens
  source 1..20: mol_type = genomic DNA
caagtccctgtccaggcgcc

SEQ ID NO: 57732 - DNA, 34 bp, Homo sapiens; identical to SEQ ID NO: 8544
  source 1..34: mol_type = genomic DNA

SEQ ID NO: 57733 - DNA, 26 bp, Homo sapiens
  source 1..26: mol_type = genomic DNA
gatttcaacttaacttgaccgctctg

SEQ ID NO: 57734 - DNA, 19 bp, Homo sapiens
  source 1..19: mol_type = genomic DNA
ggcgcggtggccaagtggt

SEQ ID NO: 57735 - DNA, 20 bp, Homo sapiens
  source 1..20: mol_type = genomic DNA
aaatcccggacgagccccca

SEQ ID NO: 57736 - DNA, 21 bp, Homo sapiens
  source 1..21: mol_type = genomic DNA
gtagtggtatcatgcaagatt

SEQ ID NO: 57737 - DNA, 29 bp, Homo sapiens
  source 1..29: mol_type = genomic DNA
tcgatggatcgaaaccatcctctgctacc

SEQ ID NO: 57738 - DNA, 19 bp, Homo sapiens
  source 1..19: mol_type = genomic DNA
agcatgggactcttaatcc

SEQ ID NO: 57739 - DNA, 20 bp, Homo sapiens
  source 1..20: mol_type = genomic DNA
cgcgaaaggtccccggttcg

SEQ ID NO: 57740 - DNA, 42 bp, Homo sapiens; identical to SEQ ID NO: 30795
  source 1..42: mol_type = genomic DNA

SEQ ID NO: 57741 - DNA, 22 bp, Homo sapiens
  source 1..22: mol_type = genomic DNA
ttcaaatctcggtgggacctcc

SEQ ID NO: 57742 - DNA, 34 bp, Homo sapiens; identical to SEQ ID NO: 8589
  source 1..34: mol_type = genomic DNA

SEQ ID NO: 57743 - DNA, 33 bp, Homo sapiens; identical to SEQ ID NO: 38314
  source 1..33: mol_type = genomic DNA

SEQ ID NO: 57744 - DNA, 47 bp, Homo sapiens; identical to SEQ ID NO: 24606
  source 1..47: mol_type = genomic DNA

SEQ ID NO: 57745 - DNA, 22 bp, Homo sapiens
  source 1..22: mol_type = genomic DNA
ttcgaatcccagtagagcctcc

SEQ ID NO: 57746 - DNA, 17 bp, Homo sapiens
  source 1..17: mol_type = genomic DNA
ttcaaatcccggacgag

SEQ ID NO: 57747 - DNA, 32 bp, Homo sapiens; identical to SEQ ID NO: 9765
  source 1..32: mol_type = genomic DNA

SEQ ID NO: 57748 - DNA, 17 bp, Homo sapiens
  source 1..17: mol_type = genomic DNA
gggtatgattctcgctt

SEQ ID NO: 57749 - DNA, 24 bp, Homo sapiens
  source 1..24: mol_type = genomic DNA
gtcaggatggccgagtggtctaag

SEQ ID NO: 57750 - DNA, 24 bp, Homo sapiens
  source 1..24: mol_type = genomic DNA
agcagagtggcgcagcggaagcgt

SEQ ID NO: 57751 - DNA, 17 bp, Homo sapiens
  source 1..17: mol_type = genomic DNA
gggtgtgataggtggca

SEQ ID NO: 57752 - DNA, 41 bp, Homo sapiens; identical to SEQ ID NO: 5913
  source 1..41: mol_type = genomic DNA

SEQ ID NO: 57753 - DNA, 21 bp, Homo sapiens
  source 1..21: mol_type = genomic DNA
ttcgaatcccagcggggcctc

SEQ ID NO: 57754 - DNA, 17 bp, Homo sapiens
  source 1..17: mol_type = genomic DNA
aattccccgacggggag

SEQ ID NO: 57755 - DNA, 35 bp, Homo sapiens; identical to SEQ ID NO: 40729
  source 1..35: mol_type = genomic DNA

SEQ ID NO: 57756 - DNA, 16 bp, Homo sapiens
  source 1..16: mol_type = genomic DNA
gttcgactcccggtgt

SEQ ID NO: 57757 - DNA, 22 bp, Homo sapiens
  source 1..22: mol_type = genomic DNA
gtctagtggttaggattcggcg

SEQ ID NO: 57758 - DNA, 19 bp, Homo sapiens
  source 1..19: mol_type = genomic DNA
gctttcaccgccgcggccc

SEQ ID NO: 57759 - DNA, 19 bp, Homo sapiens
  source 1..19: mol_type = genomic DNA
tctgaaggtcctgagttcg

SEQ ID NO: 57760 - DNA, 17 bp, Homo sapiens
  source 1..17: mol_type = genomic DNA
gggtagagcatttgact

SEQ ID NO: 57761 - DNA, 18 bp, Homo sapiens
  source 1..18: mol_type = genomic DNA
gggttcgactcccggtgt

SEQ ID NO: 57762 - DNA, 19 bp, Homo sapiens
  source 1..19: mol_type = genomic DNA
cgaatcccttcgtggttgc

SEQ ID NO: 57763 - DNA, 34 bp, Homo sapiens; identical to SEQ ID NO: 14221
  source 1..34: mol_type = genomic DNA

SEQ ID NO: 57764 - DNA, 32 bp, Homo sapiens; identical to SEQ ID NO: 17062
  source 1..32: mol_type = genomic DNA

SEQ ID NO: 57765 - DNA, 25 bp, Homo sapiens
  source 1..25: mol_type = genomic DNA
ggctgtgatggccgagtggttaagg

SEQ ID NO: 57766 - DNA, 22 bp, Homo sapiens
  source 1..22: mol_type = genomic DNA
gtttccgtagtgtagtggttat

SEQ ID NO: 57767 - DNA, 25 bp, Homo sapiens
  source 1..25: mol_type = genomic DNA
tcccacatggtctagcggttaggat

SEQ ID NO: 57768 - DNA, 17 bp, Homo sapiens
  source 1..17: mol_type = genomic DNA
atccgggtgccccctcc

SEQ ID NO: 57769 - DNA, 21 bp, Homo sapiens
  source 1..21: mol_type = genomic DNA
ttcgattccccgacggggagc

SEQ ID NO: 57770 - DNA, 36 bp, Homo sapiens; identical to SEQ ID NO: 22610
  source 1..36: mol_type = genomic DNA

SEQ ID NO: 57771 - DNA, 17 bp, Homo sapiens
  source 1..17: mol_type = genomic DNA
tggtagagcatttgact

SEQ ID NO: 57772 - DNA, 25 bp, Homo sapiens
  source 1..25: mol_type = genomic DNA
ggtgagcactctggactctgaatcc

SEQ ID NO: 57773 - DNA, 24 bp, Homo sapiens
  source 1..24: mol_type = genomic DNA
ggtctaggggtatgattctcgctt

SEQ ID NO: 57774 - DNA, 22 bp, Homo sapiens
  source 1..22: mol_type = genomic DNA
ggttcgaaaccgggcggaaaca

SEQ ID NO: 57775 - DNA, 23 bp, Homo sapiens
  source 1..23: mol_type = genomic DNA
ggttcgaatcccagcggtgcctc

SEQ ID NO: 57776 - DNA, 38 bp, Homo sapiens; identical to SEQ ID NO: 3099
  source 1..38: mol_type = genomic DNA

SEQ ID NO: 57777 - DNA, 26 bp, Homo sapiens
  source 1..26: mol_type = genomic DNA
aagcagcttcaaacctgccggggctt

SEQ ID NO: 57778 - DNA, 21 bp, Homo sapiens
  source 1..21: mol_type = genomic DNA
tcgtaaaccgaagatcgcggg

SEQ ID NO: 57779 - DNA, 22 bp, Homo sapiens
  source 1..22: mol_type = genomic DNA
gttcgattcccggccaacgcac

SEQ ID NO: 57780 - DNA, 25 bp, Homo sapiens
  source 1..25: mol_type = genomic DNA
gggttcgaatcccttcgtggttgcc

SEQ ID NO: 57781 - DNA, 38 bp, Homo sapiens; identical to SEQ ID NO: 16291
  source 1..38: mol_type = genomic DNA

SEQ ID NO: 57782 - DNA, 20 bp, Homo sapiens
  source 1..20: mol_type = genomic DNA
tcgaatcccagcggggcctc

SEQ ID NO: 57783 - DNA, 29 bp, Homo sapiens
  source 1..29: mol_type = genomic DNA
atcctgggttcgaatcccagcggtgcctc

SEQ ID NO: 57784 - DNA, 17 bp, Homo sapiens
  source 1..17: mol_type = genomic DNA
attctcggtttgggtcc

SEQ ID NO: 57785 - DNA, 42 bp, Homo sapiens; identical to SEQ ID NO: 7620
  source 1..42: mol_type = genomic DNA

SEQ ID NO: 57786 - DNA, 33 bp, Homo sapiens; identical to SEQ ID NO: 8573
  source 1..33: mol_type = genomic DNA

SEQ ID NO: 57787 - DNA, 23 bp, Homo sapiens
  source 1..23: mol_type = genomic DNA
gtatgattctcggtttgggtccg

SEQ ID NO: 57788 - DNA, 16 bp, Homo sapiens
  source 1..16: mol_type = genomic DNA
tcccggccactgcacc

SEQ ID NO: 57789 - DNA, 35 bp, Homo sapiens; identical to SEQ ID NO: 25745
  source 1..35: mol_type = genomic DNA

SEQ ID NO: 57790 - DNA, 21 bp, Homo sapiens
  source 1..21: mol_type = genomic DNA
tctggtctccggatggaggcg

SEQ ID NO: 57791 - DNA, 42 bp, Homo sapiens; identical to SEQ ID NO: 43037
  source 1..42: mol_type = genomic DNA

SEQ ID NO: 57792 - DNA, 29 bp, Homo sapiens
  source 1..29: mol_type = genomic DNA
gtcgtggttgtagtccgtgcgagaatacc

SEQ ID NO: 57793 - DNA, 18 bp, Homo sapiens
  source 1..18: mol_type = genomic DNA
gtcggtagagcatgggac

SEQ ID NO: 57794 - DNA, 16 bp, Homo sapiens
  source 1..16: mol_type = genomic DNA
tagaattctcgcctgc

SEQ ID NO: 57795 - DNA, 16 bp, Homo sapiens
  source 1..16: mol_type = genomic DNA
ccgggcagaagcacca

SEQ ID NO: 57796 - DNA, 26 bp, Homo sapiens
  source 1..26: mol_type = genomic DNA
ctggtgtagtggtatcatgcaagatt

SEQ ID NO: 57797 - DNA, 20 bp, Homo sapiens
  source 1..20: mol_type = genomic DNA
tcgaatcctgccgactacgc

SEQ ID NO: 57798 - DNA, 29 bp, Homo sapiens
  source 1..29: mol_type = genomic DNA
aagaagcagcttcaaacctgccggggctt

SEQ ID NO: 57799 - DNA, 42 bp, Homo sapiens; identical to SEQ ID NO: 9435
  source 1..42: mol_type = genomic DNA

SEQ ID NO: 57800 - DNA, 37 bp, Homo sapiens; identical to SEQ ID NO: 24648
  source 1..37: mol_type = genomic DNA

SEQ ID NO: 57801 - DNA, 27 bp, Homo sapiens
  source 1..27: mol_type = genomic DNA
agctcagtcggtagagcatgggactct

SEQ ID NO: 57802 - DNA, 19 bp, Homo sapiens
  source 1..19: mol_type = genomic DNA
cgaatcccagcggggcctc

SEQ ID NO: 57803 - DNA, 33 bp, Homo sapiens; identical to SEQ ID NO: 1355
  source 1..33: mol_type = genomic DNA

SEQ ID NO: 57804 - DNA, 35 bp, Homo sapiens; identical to SEQ ID NO: 5027
  source 1..35: mol_type = genomic DNA

SEQ ID NO: 57805 - DNA, 45 bp, Homo sapiens; identical to SEQ ID NO: 7361
  source 1..45: mol_type = genomic DNA

SEQ ID NO: 57806 - DNA, 34 bp, Homo sapiens; identical to SEQ ID NO: 33907
  source 1..34: mol_type = genomic DNA

SEQ ID NO: 57807 - DNA, 17 bp, Homo sapiens
  source 1..17: mol_type = genomic DNA
cgaaaccgggcggaaac

SEQ ID NO: 57808 - DNA, 34 bp, Homo sapiens; identical to SEQ ID NO: 20393
  source 1..34: mol_type = genomic DNA

SEQ ID NO: 57809 - DNA, 21 bp, Homo sapiens
  source 1..21: mol_type = genomic DNA
gttcgagcctcagagagggca

SEQ ID NO: 57810 - DNA, 33 bp, Homo sapiens; identical to SEQ ID NO: 24136
  source 1..33: mol_type = genomic DNA

SEQ ID NO: 57811 - DNA, 33 bp, Homo sapiens; identical to SEQ ID NO: 24144
  source 1..33: mol_type = genomic DNA

SEQ ID NO: 57812 - DNA, 43 bp, Homo sapiens; identical to SEQ ID NO: 25543
  source 1..43: mol_type = genomic DNA

SEQ ID NO: 57813 - DNA, 34 bp, Homo sapiens; identical to SEQ ID NO: 29342
  source 1..34: mol_type = genomic DNA

SEQ ID NO: 57814 - DNA, 36 bp, Homo sapiens; identical to SEQ ID NO: 42660
  source 1..36: mol_type = genomic DNA

SEQ ID NO: 57815 - DNA, 23 bp, Homo sapiens
  source 1..23: mol_type = genomic DNA
tccctggtggtctagtggttagg

SEQ ID NO: 57816 - DNA, 30 bp, Homo sapiens; identical to SEQ ID NO: 19439
  source 1..30: mol_type = genomic DNA

SEQ ID NO: 57817 - DNA, 25 bp, Homo sapiens
  source 1..25: mol_type = genomic DNA
tggttgtagtccgtgcgagaatacc

SEQ ID NO: 57818 - DNA, 36 bp, Homo sapiens; identical to SEQ ID NO: 25536
  source 1..36: mol_type = genomic DNA

SEQ ID NO: 57819 - DNA, 21 bp, Homo sapiens
  source 1..21: mol_type = genomic DNA
tctagtggttaggattcggcg

SEQ ID NO: 57820 - DNA, 24 bp, Homo sapiens
  source 1..24: mol_type = genomic DNA
gggttcgagtcccttcgtggtcgc

SEQ ID NO: 57821 - DNA, 39 bp, Homo sapiens; identical to SEQ ID NO: 3100
  source 1..39: mol_type = genomic DNA

SEQ ID NO: 57822 - DNA, 18 bp, Homo sapiens
  source 1..18: mol_type = genomic DNA
cgatcccgggtttcggca

SEQ ID NO: 57823 - DNA, 16 bp, Homo sapiens
  source 1..16: mol_type = genomic DNA
ggtagagcatgagact

SEQ ID NO: 57824 - DNA, 31 bp, Homo sapiens; identical to SEQ ID NO: 17229
  source 1..31: mol_type = genomic DNA

SEQ ID NO: 57825 - DNA, 31 bp, Homo sapiens; identical to SEQ ID NO: 33842
  source 1..31: mol_type = genomic DNA

SEQ ID NO: 57826 - DNA, 18 bp, Homo sapiens
  source 1..18: mol_type = genomic DNA
gtatgattctcgctttgg

SEQ ID NO: 57827 - DNA, 16 bp, Homo sapiens
  source 1..16: mol_type = genomic DNA
gttaggattcctggtt

SEQ ID NO: 57828 - DNA, 20 bp, Homo sapiens
  source 1..20: mol_type = genomic DNA
caaatccgggtgccccctcc

SEQ ID NO: 57829 - DNA, 36 bp, Homo sapiens; identical to SEQ ID NO: 29431
  source 1..36: mol_type = genomic DNA

SEQ ID NO: 57830 - DNA, 20 bp, Homo sapiens
  source 1..20: mol_type = genomic DNA
ttaggcctctttttaccacc

SEQ ID NO: 57831 - DNA, 19 bp, Homo sapiens
  source 1..19: mol_type = genomic DNA
cgaatccgagtcacggcac

SEQ ID NO: 57832 - DNA, 21 bp, Homo sapiens
  source 1..21: mol_type = genomic DNA
gggggtgtagctcagtggtag

SEQ ID NO: 57833 - DNA, 30 bp, Homo sapiens; identical to SEQ ID NO: 3185
  source 1..30: mol_type = genomic DNA

SEQ ID NO: 57834 - DNA, 21 bp, Homo sapiens
  source 1..21: mol_type = genomic DNA
aggtcgatggatcgaaaccat

SEQ ID NO: 57835 - DNA, 35 bp, Homo sapiens; identical to SEQ ID NO: 7816
  source 1..35: mol_type = genomic DNA

SEQ ID NO: 57836 - DNA, 41 bp, Homo sapiens; identical to SEQ ID NO: 35134
  source 1..41: mol_type = genomic DNA

SEQ ID NO: 57837 - DNA, 20 bp, Homo sapiens
  source 1..20: mol_type = genomic DNA
cgatccccgtacgggccacc

SEQ ID NO: 57838 - DNA, 39 bp, Homo sapiens; identical to SEQ ID NO: 36385
  source 1..39: mol_type = genomic DNA

SEQ ID NO: 57839 - DNA, 37 bp, Homo sapiens; identical to SEQ ID NO: 36634
  source 1..37: mol_type = genomic DNA

SEQ ID NO: 57840 - DNA, 37 bp, Homo sapiens; identical to SEQ ID NO: 14763
  source 1..37: mol_type = genomic DNA

SEQ ID NO: 57841 - DNA, 33 bp, Homo sapiens; identical to SEQ ID NO: 36994
  source 1..33: mol_type = genomic DNA

SEQ ID NO: 57842 - DNA, 33 bp, Homo sapiens; identical to SEQ ID NO: 37605
  source 1..33: mol_type = genomic DNA

SEQ ID NO: 57843 - DNA, 42 bp, Homo sapiens; identical to SEQ ID NO: 41507
  source 1..42: mol_type = genomic DNA

SEQ ID NO: 57844 - DNA, 40 bp, Homo sapiens; identical to SEQ ID NO: 26752
  source 1..40: mol_type = genomic DNA

SEQ ID NO: 57845 - DNA, 38 bp, Homo sapiens; identical to SEQ ID NO: 27496
  source 1..38: mol_type = genomic DNA

SEQ ID NO: 57846 - DNA, 43 bp, Homo sapiens; identical to SEQ ID NO: 30025
  source 1..43: mol_type = genomic DNA

SEQ ID NO: 57847 - DNA, 46 bp, Homo sapiens; identical to SEQ ID NO: 42954
  source 1..46: mol_type = genomic DNA

SEQ ID NO: 57848 - DNA, 21 bp, Homo sapiens
  source 1..21: mol_type = genomic DNA
tggtctagcggttaggattcc

SEQ ID NO: 57849 - DNA, 22 bp, Homo sapiens
  source 1..22: mol_type = genomic DNA
gggatgtagctcagtggtagag

SEQ ID NO: 57850 - DNA, 22 bp, Homo sapiens
  source 1..22: mol_type = genomic DNA
ttcgaaaccgggcggaaacacc

SEQ ID NO: 57851 - DNA, 25 bp, Homo sapiens
  source 1..25: mol_type = genomic DNA
gggttcgagtcccttcgtggtcgcc

SEQ ID NO: 57852 - DNA, 16 bp, Homo sapiens
  source 1..16: mol_type = genomic DNA
agctcagtcggtagag

SEQ ID NO: 57853 - DNA, 24 bp, Homo sapiens
  source 1..24: mol_type = genomic DNA
atggccgagcggtctaaggcgctg

SEQ ID NO: 57854 - DNA, 28 bp, Homo sapiens
  source 1..28: mol_type = genomic DNA
cgatggatcgaaaccatcctctgctacc

SEQ ID NO: 57855 - DNA, 37 bp, Homo sapiens; identical to SEQ ID NO: 11015
  source 1..37: mol_type = genomic DNA

SEQ ID NO: 57856 - DNA, 17 bp, Homo sapiens
  source 1..17: mol_type = genomic DNA
tggttatcacgtctgct

SEQ ID NO: 57857 - DNA, 20 bp, Homo sapiens
  source 1..20: mol_type = genomic DNA
cgaatccggctcggaggacc

SEQ ID NO: 57858 - DNA, 24 bp, Homo sapiens
  source 1..24: mol_type = genomic DNA
ggttcgaatcccacttctgacacc

SEQ ID NO: 57859 - DNA, 19 bp, Homo sapiens
  source 1..19: mol_type = genomic DNA
cagagtggcgcagcggaag

SEQ ID NO: 57860 - DNA, 23 bp, Homo sapiens
  source 1..23: mol_type = genomic DNA
gttcaaatcccggacgagccccc

SEQ ID NO: 57861 - DNA, 22 bp, Homo sapiens
  source 1..22: mol_type = genomic DNA
ttcgagtcctgccgcggtcgcc

SEQ ID NO: 57862 - DNA, 31 bp, Homo sapiens; identical to SEQ ID NO: 7478
  source 1..31: mol_type = genomic DNA

SEQ ID NO: 57863 - DNA, 21 bp, Homo sapiens
  source 1..21: mol_type = genomic DNA
ttcgattcccgggcggcgcac

SEQ ID NO: 57864 - DNA, 25 bp, Homo sapiens
  source 1..25: mol_type = genomic DNA
tggttcgaatccggctcgaaggacc

SEQ ID NO: 57865 - DNA, 25 bp, Homo sapiens
  source 1..25: mol_type = genomic DNA
aaggataacagctatccattggtct

SEQ ID NO: 57866 - DNA, 20 bp, Homo sapiens
  source 1..20: mol_type = genomic DNA
cgagcctcacctggagcacc

SEQ ID NO: 57867 - DNA, 31 bp, Homo sapiens; identical to SEQ ID NO: 1353
  source 1..31: mol_type = genomic DNA

SEQ ID NO: 57868 - DNA, 32 bp, Homo sapiens; identical to SEQ ID NO: 1663
  source 1..32: mol_type = genomic DNA

SEQ ID NO: 57869 - DNA, 33 bp, Homo sapiens; identical to SEQ ID NO: 1674
  source 1..33: mol_type = genomic DNA

SEQ ID NO: 57870 - DNA, 32 bp, Homo sapiens; identical to SEQ ID NO: 5171
  source 1..32: mol_type = genomic DNA

SEQ ID NO: 57871 - DNA, 37 bp, Homo sapiens; identical to SEQ ID NO: 6335
  source 1..37: mol_type = genomic DNA

SEQ ID NO: 57872 - DNA, 16 bp, Homo sapiens
  source 1..16: mol_type = genomic DNA
atccccgtacgggcca

SEQ ID NO: 57873 - DNA, 34 bp, Homo sapiens; identical to SEQ ID NO: 6891
  source 1..34: mol_type = genomic DNA

SEQ ID NO: 57874 - DNA, 37 bp, Homo sapiens; identical to SEQ ID NO: 8107
  source 1..37: mol_type = genomic DNA

SEQ ID NO: 57875 - DNA, 39 bp, Homo sapiens; identical to SEQ ID NO: 33918
  source 1..39: mol_type = genomic DNA

SEQ ID NO: 57876 - DNA, 35 bp, Homo sapiens; identical to SEQ ID NO: 11540
  source 1..35: mol_type = genomic DNA

SEQ ID NO: 57877 - DNA, 19 bp, Homo sapiens
  source 1..19: mol_type = genomic DNA
cgaatcctgttcgtgacgc

SEQ ID NO: 57878 - DNA, 25 bp, Homo sapiens
  source 1..25: mol_type = genomic DNA
cgggttcaatccccggcatctccac

SEQ ID NO: 57879 - DNA, 40 bp, Homo sapiens; identical to SEQ ID NO: 36335
  source 1..40: mol_type = genomic DNA

SEQ ID NO: 57880 - DNA, 18 bp, Homo sapiens
  source 1..18: mol_type = genomic DNA
cttaagatccaatggatt

SEQ ID NO: 57881 - DNA, 18 bp, Homo sapiens
  source 1..18: mol_type = genomic DNA
gaaaccgggcagaagcac

SEQ ID NO: 57882 - DNA, 32 bp, Homo sapiens; identical to SEQ ID NO: 15533
  source 1..32: mol_type = genomic DNA

SEQ ID NO: 57883 - DNA, 29 bp, Homo sapiens
  source 1..29: mol_type = genomic DNA
gatccgagttcaaatctcggtgggacctc

SEQ ID NO: 57884 - DNA, 35 bp, Homo sapiens; identical to SEQ ID NO: 20596
  source 1..35: mol_type = genomic DNA

SEQ ID NO: 57885 - DNA, 29 bp, Homo sapiens
  source 1..29: mol_type = genomic DNA
tcagaagattgagggttcgaatcccttcg

SEQ ID NO: 57886 - DNA, 20 bp, Homo sapiens
  source 1..20: mol_type = genomic DNA
tcgaatcctgttcgtgacgc

SEQ ID NO: 57887 - DNA, 16 bp, Homo sapiens
  source 1..16: mol_type = genomic DNA
tctaaggcgctgcgtt

SEQ ID NO: 57888 - DNA, 36 bp, Homo sapiens; identical to SEQ ID NO: 26872
  source 1..36: mol_type = genomic DNA

SEQ ID NO: 57889 - DNA, 44 bp, Homo sapiens; identical to SEQ ID NO: 29744
  source 1..44: mol_type = genomic DNA

SEQ ID NO: 57890 - DNA, 29 bp, Homo sapiens
  source 1..29: mol_type = genomic DNA
ttgagggttcgaatcccttcgtggttgcc

SEQ ID NO: 57891 - DNA, 24 bp, Homo sapiens
  source 1..24: mol_type = genomic DNA
ggttcgattccccgacggggagcc

SEQ ID NO: 57892 - DNA, 26 bp, Homo sapiens
  source 1..26: mol_type = genomic DNA
gggttcgattcccggtcagggaacca

SEQ ID NO: 57893 - DNA, 26 bp, Homo sapiens
  source 1..26: mol_type = genomic DNA
gttcagtggtagaattctcgcctgcc

SEQ ID NO: 57894 - DNA, 23 bp, Homo sapiens
  source 1..23: mol_type = genomic DNA
tcgtggttgtagtccgtgcgaga

SEQ ID NO: 57895 - DNA, 25 bp, Homo sapiens
  source 1..25: mol_type = genomic DNA
ctggtggtctagtggttaggattcg

SEQ ID NO: 57896 - DNA, 16 bp, Homo sapiens
  source 1..16: mol_type = genomic DNA
ccttcgatagctcagc

SEQ ID NO: 57897 - DNA, 27 bp, Homo sapiens
  source 1..27: mol_type = genomic DNA
tagctcagtcggtagagcatgggactc

SEQ ID NO: 57898 - DNA, 24 bp, Homo sapiens
  source 1..24: mol_type = genomic DNA
cgtggttgtagtccgtgcgagaat

SEQ ID NO: 57899 - DNA, 22 bp, Homo sapiens
  source 1..22: mol_type = genomic DNA
ttcaaatcccggacgagccccc

SEQ ID NO: 57900 - DNA, 19 bp, Homo sapiens
  source 1..19: mol_type = genomic DNA
aatccgagtcacggcacca

SEQ ID NO: 57901 - DNA, 19 bp, Homo sapiens
  source 1..19: mol_type = genomic DNA
tcgaatccgagtcacggca

SEQ ID NO: 57902 - DNA, 23 bp, Homo sapiens
  source 1..23: mol_type = genomic DNA
aggttcgactcctggctggctcg

SEQ ID NO: 57903 - DNA, 22 bp, Homo sapiens
  source 1..22: mol_type = genomic DNA
ttcgaatcccacttctgacacc

SEQ ID NO: 57904 - DNA, 18 bp, Homo sapiens
  source 1..18: mol_type = genomic DNA
agccccagtggaaccacc

SEQ ID NO: 57905 - DNA, 20 bp, Homo sapiens
  source 1..20: mol_type = genomic DNA
acttaagatccaatggacat

SEQ ID NO: 57906 - DNA, 21 bp, Homo sapiens
  source 1..21: mol_type = genomic DNA
gttcgattcccggccaacgca

SEQ ID NO: 57907 - DNA, 23 bp, Homo sapiens
  source 1..23: mol_type = genomic DNA
ggttcgagtcccttcgtggtcgc

SEQ ID NO: 57908 - DNA, 37 bp, Homo sapiens; identical to SEQ ID NO: 14011
  source 1..37: mol_type = genomic DNA

SEQ ID NO: 57909 - DNA, 29 bp, Homo sapiens
  source 1..29: mol_type = genomic DNA
gattccaggttcgactcctggctggctcg

SEQ ID NO: 57910 - DNA, 36 bp, Homo sapiens; identical to SEQ ID NO: 2162
  source 1..36: mol_type = genomic DNA

SEQ ID NO: 57911 - DNA, 19 bp, Homo sapiens
  source 1..19: mol_type = genomic DNA
cttcaaacctgccggggct

SEQ ID NO: 57912 - DNA, 20 bp, Homo sapiens
  source 1..20: mol_type = genomic DNA
gtagaattctcgcctgccac

SEQ ID NO: 57913 - DNA, 20 bp, Homo sapiens
  source 1..20: mol_type = genomic DNA
gttcaagtccctgttcgggc

SEQ ID NO: 57914 - DNA, 30 bp, Homo sapiens; identical to SEQ ID NO: 24572
  source 1..30: mol_type = genomic DNA

SEQ ID NO: 57915 - DNA, 24 bp, Homo sapiens
  source 1..24: mol_type = genomic DNA
gggttcgaatcccttcgtggttgc

SEQ ID NO: 57916 - DNA, 23 bp, Homo sapiens
  source 1..23: mol_type = genomic DNA
cggttcgaatccgagtcacggca

SEQ ID NO: 57917 - DNA, 31 bp, Homo sapiens; identical to SEQ ID NO: 16192
  source 1..31: mol_type = genomic DNA

SEQ ID NO: 57918 - DNA, 20 bp, Homo sapiens
  source 1..20: mol_type = genomic DNA
gttcgagcctcacacggggc

SEQ ID NO: 57919 - DNA, 21 bp, Homo sapiens
  source 1..21: mol_type = genomic DNA
tcgagtcccatctgggtcgcc

SEQ ID NO: 57920 - DNA, 21 bp, Homo sapiens
  source 1..21: mol_type = genomic DNA
tggtctaggggtatgattctc

SEQ ID NO: 57921 - DNA, 20 bp, Homo sapiens
  source 1..20: mol_type = genomic DNA
caaatctcggtgggacctcc

SEQ ID NO: 57922 - DNA, 19 bp, Homo sapiens
  source 1..19: mol_type = genomic DNA
agtccctgttcgggcgcca

SEQ ID NO: 57923 - DNA, 25 bp, Homo sapiens
  source 1..25: mol_type = genomic DNA
agggattgtgggttcgagtcccatc

SEQ ID NO: 57924 - DNA, 32 bp, Homo sapiens; identical to SEQ ID NO: 12011
  source 1..32: mol_type = genomic DNA

SEQ ID NO: 57925 - DNA, 34 bp, Homo sapiens; identical to SEQ ID NO: 12013
  source 1..34: mol_type = genomic DNA

SEQ ID NO: 57926 - DNA, 33 bp, Homo sapiens; identical to SEQ ID NO: 12012
  source 1..33: mol_type = genomic DNA

SEQ ID NO: 57927 - DNA, 34 bp, Homo sapiens; identical to SEQ ID NO: 13078
  source 1..34: mol_type = genomic DNA

SEQ ID NO: 57928 - DNA, 35 bp, Homo sapiens; identical to SEQ ID NO: 12014
  source 1..35: mol_type = genomic DNA

SEQ ID NO: 57929 - DNA, 32 bp, Homo sapiens; identical to SEQ ID NO: 16341
  source 1..32: mol_type = genomic DNA

SEQ ID NO: 57930 - DNA, 33 bp, Homo sapiens; identical to SEQ ID NO: 11999
  source 1..33: mol_type = genomic DNA

SEQ ID NO: 57931 - DNA, 33 bp, Homo sapiens; identical to SEQ ID NO: 22474
  source 1..33: mol_type = genomic DNA

SEQ ID NO: 57932 - DNA, 31 bp, Homo sapiens; identical to SEQ ID NO: 16340
  source 1..31: mol_type = genomic DNA

SEQ ID NO: 57933 - DNA, 19 bp, Homo sapiens
  source 1..19: mol_type = genomic DNA
cgcattggtggttcagtgg

SEQ ID NO: 57934 - DNA, 18 bp, Homo sapiens
  source 1..18: mol_type = genomic DNA
cccccatgtctaacaaca

SEQ ID NO: 57935 - DNA, 20 bp, Homo sapiens
  source 1..20: mol_type = genomic DNA
agactcaagttctggtctcc

SEQ ID NO: 57936 - DNA, 22 bp, Homo sapiens
  source 1..22: mol_type = genomic DNA
gcggttatcacgtctgctttac

SEQ ID NO: 57937 - DNA, 30 bp, Homo sapiens; identical to SEQ ID NO: 20531
  source 1..30: mol_type = genomic DNA

SEQ ID NO: 57938 - DNA, 48 bp, Homo sapiens; identical to SEQ ID NO: 19948
  source 1..48: mol_type = genomic DNA

SEQ ID NO: 57939 - DNA, 33 bp, Homo sapiens; identical to SEQ ID NO: 29187
  source 1..33: mol_type = genomic DNA

SEQ ID NO: 57940 - DNA, 48 bp, Homo sapiens; identical to SEQ ID NO: 30128
  source 1..48: mol_type = genomic DNA

SEQ ID NO: 57941 - DNA, 31 bp, Homo sapiens; identical to SEQ ID NO: 16631
  source 1..31: mol_type = genomic DNA

SEQ ID NO: 57942 - DNA, 48 bp, Homo sapiens; identical to SEQ ID NO: 1967
  source 1..48: mol_type = genomic DNA

SEQ ID NO: 57943 - DNA, 32 bp, Homo sapiens; identical to SEQ ID NO: 22473
  source 1..32: mol_type = genomic DNA

SEQ ID NO: 57944 - DNA, 34 bp, Homo sapiens; identical to SEQ ID NO: 13076
  source 1..34: mol_type = genomic DNA

SEQ ID NO: 57945 - DNA, 21 bp, Homo sapiens
  source 1..21: mol_type = genomic DNA
cgtagtcgtggccgagtggtt

SEQ ID NO: 57946 - DNA, 42 bp, Homo sapiens; identical to SEQ ID NO: 19943
  source 1..42: mol_type = genomic DNA

SEQ ID NO: 57947 - DNA, 21 bp, Homo sapiens
  source 1..21: mol_type = genomic DNA
aacaacatggctttctcacca

SEQ ID NO: 57948 - DNA, 48 bp, Homo sapiens; identical to SEQ ID NO: 11342
  source 1..48: mol_type = genomic DNA

SEQ ID NO: 57949 - DNA, 31 bp, Homo sapiens; identical to SEQ ID NO: 12010
  source 1..31: mol_type = genomic DNA

SEQ ID NO: 57950 - DNA, 48 bp, Homo sapiens; identical to SEQ ID NO: 23640
  source 1..48: mol_type = genomic DNA

SEQ ID NO: 57951 - DNA, 48 bp, Homo sapiens; identical to SEQ ID NO: 6485
  source 1..48: mol_type = genomic DNA

SEQ ID NO: 57952 - DNA, 48 bp, Homo sapiens; identical to SEQ ID NO: 22200
  source 1..48: mol_type = genomic DNA

SEQ ID NO: 57953 - DNA, 30 bp, Homo sapiens; identical to SEQ ID NO: 746
  source 1..30: mol_type = genomic DNA

SEQ ID NO: 57954 - DNA, 31 bp, Homo sapiens; identical to SEQ ID NO: 16402
  source 1..31: mol_type = genomic DNA

SEQ ID NO: 57955 - DNA, 48 bp, Homo sapiens; identical to SEQ ID NO: 16576
  source 1..48: mol_type = genomic DNA

SEQ ID NO: 57956 - DNA, 36 bp, Homo sapiens; identical to SEQ ID NO: 8927
  source 1..36: mol_type = genomic DNA

SEQ ID NO: 57957 - DNA, 21 bp, Homo sapiens
  source 1..21: mol_type = genomic DNA
cagtcggtggagcatgggact

SEQ ID NO: 57958 - DNA, 16 bp, Homo sapiens
  source 1..16: mol_type = genomic DNA
ggtatgattctcgctt

SEQ ID NO: 57959 - DNA, 48 bp, Homo sapiens; identical to SEQ ID NO: 54722
  source 1..48: mol_type = genomic DNA

SEQ ID NO: 57960 - DNA, 33 bp, Homo sapiens; identical to SEQ ID NO: 22561
  source 1..33: mol_type = genomic DNA

SEQ ID NO: 57961 - DNA, 33 bp, Homo sapiens; identical to SEQ ID NO: 18529
  source 1..33: mol_type = genomic DNA

SEQ ID NO: 57962 - DNA, 34 bp, Homo sapiens; identical to SEQ ID NO: 4416
  source 1..34: mol_type = genomic DNA

SEQ ID NO: 57963 - DNA, 48 bp, Homo sapiens; identical to SEQ ID NO: 7748
  source 1..48: mol_type = genomic DNA

SEQ ID NO: 57964 - DNA, 20 bp, Homo sapiens
  source 1..20: mol_type = genomic DNA
accagaatggccgagtggtt

SEQ ID NO: 57965 - DNA, 24 bp, Homo sapiens
  source 1..24: mol_type = genomic DNA
ccatatggtctagcggttaggatt

SEQ ID NO: 57966 - DNA, 33 bp, Homo sapiens; identical to SEQ ID NO: 3335
  source 1..33: mol_type = genomic DNA

SEQ ID NO: 57967 - DNA, 48 bp, Homo sapiens; identical to SEQ ID NO: 17348
  source 1..48: mol_type = genomic DNA

SEQ ID NO: 57968 - DNA, 48 bp, Homo sapiens; identical to SEQ ID NO: 29125
  source 1..48: mol_type = genomic DNA

SEQ ID NO: 57969 - DNA, 42 bp, Homo sapiens; identical to SEQ ID NO: 16649
  source 1..42: mol_type = genomic DNA

SEQ ID NO: 57970 - DNA, 39 bp, Homo sapiens; identical to SEQ ID NO: 20159
  source 1..39: mol_type = genomic DNA

SEQ ID NO: 57971 - DNA, 21 bp, Homo sapiens
  source 1..21: mol_type = genomic DNA
gggtggttcagtggtagaatt

SEQ ID NO: 57972 - DNA, 21 bp, Homo sapiens
  source 1..21: mol_type = genomic DNA
ggggatgtagctcagtggtag

SEQ ID NO: 57973 - DNA, 48 bp, Homo sapiens; identical to SEQ ID NO: 3662
  source 1..48: mol_type = genomic DNA

SEQ ID NO: 57974 - DNA, 26 bp, Homo sapiens
  source 1..26: mol_type = genomic DNA
gtagtggttatcacgttcgcctcaca

SEQ ID NO: 57975 - DNA, 32 bp, Homo sapiens; identical to SEQ ID NO: 22553
  source 1..32: mol_type = genomic DNA

SEQ ID NO: 57976 - DNA, 27 bp, Homo sapiens
  source 1..27: mol_type = genomic DNA
gcggcccgggttcgactcccggtgtgg

SEQ ID NO: 57977 - DNA, 48 bp, Homo sapiens; identical to SEQ ID NO: 7509
  source 1..48: mol_type = genomic DNA

SEQ ID NO: 57978 - DNA, 48 bp, Homo sapiens; identical to SEQ ID NO: 3634
  source 1..48: mol_type = genomic DNA

SEQ ID NO: 57979 - DNA, 29 bp, Homo sapiens
  source 1..29: mol_type = genomic DNA
tcgtatagtggttagtactctgcgttgtg

SEQ ID NO: 57980 - DNA, 28 bp, Homo sapiens
  source 1..28: mol_type = genomic DNA
agtcggtagagcatgagacccttaatct

SEQ ID NO: 57981 - DNA, 48 bp, Homo sapiens; identical to SEQ ID NO: 1961
  source 1..48: mol_type = genomic DNA

SEQ ID NO: 57982 - DNA, 33 bp, Homo sapiens; identical to SEQ ID NO: 13075
  source 1..33: mol_type = genomic DNA

SEQ ID NO: 57983 - DNA, 17 bp, Homo sapiens
  source 1..17: mol_type = genomic DNA
tagctcaggcggtagag

SEQ ID NO: 57984 - DNA, 27 bp, Homo sapiens
  source 1..27: mol_type = genomic DNA
gtgtagtggttatcacgtctgctttac

SEQ ID NO: 57985 - DNA, 41 bp, Homo sapiens; identical to SEQ ID NO: 9223
  source 1..41: mol_type = genomic DNA

SEQ ID NO: 57986 - DNA, 48 bp, Homo sapiens; identical to SEQ ID NO: 29231
  source 1..48: mol_type = genomic DNA

SEQ ID NO: 57987 - DNA, 48 bp, Homo sapiens; identical to SEQ ID NO: 15008
  source 1..48: mol_type = genomic DNA

SEQ ID NO: 57988 - DNA, 35 bp, Homo sapiens; identical to SEQ ID NO: 12001
  source 1..35: mol_type = genomic DNA

SEQ ID NO: 57989 - DNA, 48 bp, Homo sapiens; identical to SEQ ID NO: 6628
  source 1..48: mol_type = genomic DNA

SEQ ID NO: 57990 - DNA, 23 bp, Homo sapiens
  source 1..23: mol_type = genomic DNA
gctcagtcggtagagcatgggac

SEQ ID NO: 57991 - DNA, 48 bp, Homo sapiens; identical to SEQ ID NO: 12321
  source 1..48: mol_type = genomic DNA

SEQ ID NO: 57992 - DNA, 23 bp, Homo sapiens
  source 1..23: mol_type = genomic DNA
tagagcatgggactcttaatctc

SEQ ID NO: 57993 - DNA, 48 bp, Homo sapiens; identical to SEQ ID NO: 978
  source 1..48: mol_type = genomic DNA

SEQ ID NO: 57994 - DNA, 48 bp, Homo sapiens; identical to SEQ ID NO: 29587
  source 1..48: mol_type = genomic DNA

SEQ ID NO: 57995 - DNA, 22 bp, Homo sapiens
  source 1..22: mol_type = genomic DNA
gggggattagctcaaatggtag

SEQ ID NO: 57996 - DNA, 48 bp, Homo sapiens; identical to SEQ ID NO: 7156
  source 1..48: mol_type = genomic DNA

SEQ ID NO: 57997 - DNA, 22 bp, Homo sapiens
  source 1..22: mol_type = genomic DNA
gtggttatcacgttcgcctcac

SEQ ID NO: 57998 - DNA, 17 bp, Homo sapiens
  source 1..17: mol_type = genomic DNA
cgtagtcgtggccgagt

SEQ ID NO: 57999 - DNA, 48 bp, Homo sapiens; identical to SEQ ID NO: 28392
  source 1..48: mol_type = genomic DNA

SEQ ID NO: 58000 - DNA, 48 bp, Homo sapiens; identical to SEQ ID NO: 12371
  source 1..48: mol_type = genomic DNA

SEQ ID NO: 58001 - DNA, 48 bp, Homo sapiens; identical to SEQ ID NO: 25250
  source 1..48: mol_type = genomic DNA

SEQ ID NO: 58002 - DNA, 22 bp, Homo sapiens
  source 1..22: mol_type = genomic DNA
ggttcgactcctggctggctcg

SEQ ID NO: 58003 - DNA, 48 bp, Homo sapiens; identical to SEQ ID NO: 24785
  source 1..48: mol_type = genomic DNA

SEQ ID NO: 58004 - DNA, 18 bp, Homo sapiens
  source 1..18: mol_type = genomic DNA
cgaaaaagtcatggaggc

SEQ ID NO: 58005 - DNA, 34 bp, Homo sapiens; identical to SEQ ID NO: 12000
  source 1..34: mol_type = genomic DNA

SEQ ID NO: 58006 - DNA, 29 bp, Homo sapiens
  source 1..29: mol_type = genomic DNA
gtgatcgtatagtggttagtactctgcgt

SEQ ID NO: 58007 - DNA, 17 bp, Homo sapiens
  source 1..17: mol_type = genomic DNA
agttctggtctccggat

SEQ ID NO: 58008 - DNA, 18 bp, Homo sapiens
  source 1..18: mol_type = genomic DNA
gtcccatctgggtcgcca

SEQ ID NO: 58009 - DNA, 25 bp, Homo sapiens
  source 1..25: mol_type = genomic DNA
agtcggtagagcatgagacccttaa

SEQ ID NO: 58010 - DNA, 26 bp, Homo sapiens
  source 1..26: mol_type = genomic DNA
tggtctagtggttaggattcggcgct

SEQ ID NO: 58011 - DNA, 48 bp, Homo sapiens; identical to SEQ ID NO: 15503
  source 1..48: mol_type = genomic DNA

SEQ ID NO: 58012 - DNA, 48 bp, Homo sapiens; identical to SEQ ID NO: 7292
  source 1..48: mol_type = genomic DNA

SEQ ID NO: 58013 - DNA, 29 bp, Homo sapiens
  source 1..29: mol_type = genomic DNA
cgccgtgatcgtatagtggttagtactct

SEQ ID NO: 58014 - DNA, 19 bp, Homo sapiens
  source 1..19: mol_type = genomic DNA
gtctaacaacatggctttc

SEQ ID NO: 58015 - DNA, 48 bp, Homo sapiens; identical to SEQ ID NO: 21736
  source 1..48: mol_type = genomic DNA

SEQ ID NO: 58016 - DNA, 24 bp, Homo sapiens
  source 1..24: mol_type = genomic DNA
ctcgttagtatagtggtgagtatc

SEQ ID NO: 58017 - DNA, 48 bp, Homo sapiens; identical to SEQ ID NO: 30101
  source 1..48: mol_type = genomic DNA

SEQ ID NO: 58018 - DNA, 16 bp, Homo sapiens
  source 1..16: mol_type = genomic DNA
ccggggttcgattccc

SEQ ID NO: 58019 - DNA, 36 bp, Homo sapiens; identical to SEQ ID NO: 11967
  source 1..36: mol_type = genomic DNA

SEQ ID NO: 58020 - DNA, 40 bp, Homo sapiens; identical to SEQ ID NO: 25616
  source 1..40: mol_type = genomic DNA

SEQ ID NO: 58021 - DNA, 29 bp, Homo sapiens
  source 1..29: mol_type = genomic DNA
ccgtagtggagtggttatcacgttcgcct

SEQ ID NO: 58022 - DNA, 41 bp, Homo sapiens; identical to SEQ ID NO: 16648
  source 1..41: mol_type = genomic DNA

SEQ ID NO: 58023 - DNA, 16 bp, Homo sapiens
  source 1..16: mol_type = genomic DNA
ttcctcttcttaacac

SEQ ID NO: 58024 - DNA, 24 bp, Homo sapiens
  source 1..24: mol_type = genomic DNA
ggtctaggggtatgattctcgctt

SEQ ID NO: 58025 - DNA, 45 bp, Homo sapiens; identical to SEQ ID NO: 15432
  source 1..45: mol_type = genomic DNA

SEQ ID NO: 58026 - DNA, 40 bp, Homo sapiens; identical to SEQ ID NO: 11417
  source 1..40: mol_type = genomic DNA

SEQ ID NO: 58027 - DNA, 29 bp, Homo sapiens
  source 1..29: mol_type = genomic DNA
ttggtggttcagtggtagaattctcgcct

SEQ ID NO: 58028 - DNA, 28 bp, Homo sapiens
  source 1..28: mol_type = genomic DNA
gttagcactctggactctgaatccagcg

SEQ ID NO: 58029 - DNA, 31 bp, Homo sapiens; identical to SEQ ID NO: 747
  source 1..31: mol_type = genomic DNA

SEQ ID NO: 58030 - DNA, 48 bp, Homo sapiens; identical to SEQ ID NO: 16967
  source 1..48: mol_type = genomic DNA

SEQ ID NO: 58031 - DNA, 18 bp, Homo sapiens
  source 1..18: mol_type = genomic DNA
cgatgcccgcatcctcca

SEQ ID NO: 58032 - DNA, 29 bp, Homo sapiens
  source 1..29: mol_type = genomic DNA
acagaggcttacgaccccttatttacccc

SEQ ID NO: 58033 - DNA, 27 bp, Homo sapiens
  source 1..27: mol_type = genomic DNA
gtcggtagagcatgagacccttaatct

SEQ ID NO: 58034 - DNA, 24 bp, Homo sapiens
  source 1..24: mol_type = genomic DNA
tcggtagagcatgagacccttaat

SEQ ID NO: 58035 - DNA, 48 bp, Homo sapiens; identical to SEQ ID NO: 13921
  source 1..48: mol_type = genomic DNA

SEQ ID NO: 58036 - DNA, 27 bp, Homo sapiens
  source 1..27: mol_type = genomic DNA
gctggtgtagtggtatcatgcaagatt

SEQ ID NO: 58037 - DNA, 18 bp, Homo sapiens
  source 1..18: mol_type = genomic DNA
gcaatggtggttcagtgg

SEQ ID NO: 58038 - DNA, 43 bp, Homo sapiens; identical to SEQ ID NO: 30472
  source 1..43: mol_type = genomic DNA

SEQ ID NO: 58039 - DNA, 37 bp, Homo sapiens; identical to SEQ ID NO: 16346
  source 1..37: mol_type = genomic DNA

SEQ ID NO: 58040 - DNA, 32 bp, Homo sapiens; identical to SEQ ID NO: 1917
  source 1..32: mol_type = genomic DNA

SEQ ID NO: 58041 - DNA, 29 bp, Homo sapiens
  source 1..29: mol_type = genomic DNA
ttagtatagtggtgagtatccccgcctgt

SEQ ID NO: 58042 - DNA, 36 bp, Homo sapiens; identical to SEQ ID NO: 8433
  source 1..36: mol_type = genomic DNA

SEQ ID NO: 58043 - DNA, 48 bp, Homo sapiens; identical to SEQ ID NO: 17689
  source 1..48: mol_type = genomic DNA

SEQ ID NO: 58044 - DNA, 47 bp, Homo sapiens; identical to SEQ ID NO: 17155
  source 1..47: mol_type = genomic DNA

SEQ ID NO: 58045 - DNA, 30 bp, Homo sapiens; identical to SEQ ID NO: 6089
  source 1..30: mol_type = genomic DNA

SEQ ID NO: 58046 - DNA, 23 bp, Homo sapiens
  source 1..23: mol_type = genomic DNA
tctgaaggtcgtgagttcgagcc

SEQ ID NO: 58047 - DNA, 17 bp, Homo sapiens
  source 1..17: mol_type = genomic DNA
gttcgatccccgtacgg

SEQ ID NO: 58048 - DNA, 19 bp, Homo sapiens
  source 1..19: mol_type = genomic DNA
cacgttcgcctcacacgcg

SEQ ID NO: 58049 - DNA, 48 bp, Homo sapiens; identical to SEQ ID NO: 16655
  source 1..48: mol_type = genomic DNA

SEQ ID NO: 58050 - DNA, 23 bp, Homo sapiens
  source 1..23: mol_type = genomic DNA
ccggatagctcagtcggtagagc

SEQ ID NO: 58051 - DNA, 17 bp, Homo sapiens
  source 1..17: mol_type = genomic DNA
agcagagtggcgcagcg

SEQ ID NO: 58052 - DNA, 29 bp, Homo sapiens
  source 1..29: mol_type = genomic DNA
ttggtggtgcagtggtagaattctcgcct

SEQ ID NO: 58053 - DNA, 48 bp, Homo sapiens; identical to SEQ ID NO: 4219
  source 1..48: mol_type = genomic DNA

SEQ ID NO: 58054 - DNA, 22 bp, Homo sapiens
  source 1..22: mol_type = genomic DNA
ctcagtcggtagagcatgagac

SEQ ID NO: 58055 - DNA, 48 bp, Homo sapiens; identical to SEQ ID NO: 16444
  source 1..48: mol_type = genomic DNA

SEQ ID NO: 58056 - DNA, 48 bp, Homo sapiens; identical to SEQ ID NO: 2026
  source 1..48: mol_type = genomic DNA

SEQ ID NO: 58057 - DNA, 19 bp, Homo sapiens
  source 1..19: mol_type = genomic DNA
agtgggtagagcatcagac

SEQ ID NO: 58058 - DNA, 48 bp, Homo sapiens; identical to SEQ ID NO: 23967
  source 1..48: mol_type = genomic DNA

SEQ ID NO: 58059 - DNA, 48 bp, Homo sapiens; identical to SEQ ID NO: 4619
  source 1..48: mol_type = genomic DNA

SEQ ID NO: 58060 - DNA, 35 bp, Homo sapiens; identical to SEQ ID NO: 24953
  source 1..35: mol_type = genomic DNA

SEQ ID NO: 58061 - DNA, 27 bp, Homo sapiens
  source 1..27: mol_type = genomic DNA
cagtcggtagagcatgagacccttaat

SEQ ID NO: 58062 - DNA, 25 bp, Homo sapiens
  source 1..25: mol_type = genomic DNA
ggttcgaatcccactcctgacacca

SEQ ID NO: 58063 - DNA, 23 bp, Homo sapiens
  source 1..23: mol_type = genomic DNA
ctcagtcggtagagcatgagacc

SEQ ID NO: 58064 - DNA, 48 bp, Homo sapiens; identical to SEQ ID NO: 23772
  source 1..48: mol_type = genomic DNA

SEQ ID NO: 58065 - DNA, 36 bp, Homo sapiens; identical to SEQ ID NO: 20889
  source 1..36: mol_type = genomic DNA

SEQ ID NO: 58066 - DNA, 48 bp, Homo sapiens; identical to SEQ ID NO: 3036
  source 1..48: mol_type = genomic DNA

SEQ ID NO: 58067 - DNA, 29 bp, Homo sapiens
  source 1..29: mol_type = genomic DNA
tagctcagtcggtagagcatcagactttt

SEQ ID NO: 58068 - DNA, 23 bp, Homo sapiens
  source 1..23: mol_type = genomic DNA
gtagagcatgagacccttaatct

SEQ ID NO: 58069 - DNA, 48 bp, Homo sapiens; identical to SEQ ID NO: 3091
  source 1..48: mol_type = genomic DNA

SEQ ID NO: 58070 - DNA, 23 bp, Homo sapiens
  source 1..23: mol_type = genomic DNA
gtgagtatccccgcctgtcacgc

SEQ ID NO: 58071 - DNA, 33 bp, Homo sapiens; identical to SEQ ID NO: 14911
  source 1..33: mol_type = genomic DNA

SEQ ID NO: 58072 - DNA, 25 bp, Homo sapiens
  source 1..25: mol_type = genomic DNA
tcataatctgaaggtcgtgagttcg

SEQ ID NO: 58073 - DNA, 42 bp, Homo sapiens; identical to SEQ ID NO: 30984
  source 1..42: mol_type = genomic DNA

SEQ ID NO: 58074 - DNA, 16 bp, Homo sapiens
  source 1..16: mol_type = genomic DNA
tcaaatcccggacgag

SEQ ID NO: 58075 - DNA, 30 bp, Homo sapiens; identical to SEQ ID NO: 23456
  source 1..30: mol_type = genomic DNA

SEQ ID NO: 58076 - DNA, 36 bp, Homo sapiens; identical to SEQ ID NO: 24964
  source 1..36: mol_type = genomic DNA

SEQ ID NO: 58077 - DNA, 19 bp, Homo sapiens
  source 1..19: mol_type = genomic DNA
cctggtggtctagtggcta

SEQ ID NO: 58078 - DNA, 48 bp, Homo sapiens; identical to SEQ ID NO: 8259
  source 1..48: mol_type = genomic DNA

SEQ ID NO: 58079 - DNA, 16 bp, Homo sapiens
  source 1..16: mol_type = genomic DNA
accgagcggaaacacc

SEQ ID NO: 58080 - DNA, 26 bp, Homo sapiens
  source 1..26: mol_type = genomic DNA
ttggtctaggggtatgattctcgctt

SEQ ID NO: 58081 - DNA, 48 bp, Homo sapiens; identical to SEQ ID NO: 1889
  source 1..48: mol_type = genomic DNA

SEQ ID NO: 58082 - DNA, 35 bp, Homo sapiens; identical to SEQ ID NO: 14359
  source 1..35: mol_type = genomic DNA

SEQ ID NO: 58083 - DNA, 31 bp, Homo sapiens; identical to SEQ ID NO: 30884
  source 1..31: mol_type = genomic DNA

SEQ ID NO: 58084 - DNA, 33 bp, Homo sapiens; identical to SEQ ID NO: 15078
  source 1..33: mol_type = genomic DNA

SEQ ID NO: 58085 - DNA, 46 bp, Homo sapiens; identical to SEQ ID NO: 543
  source 1..46: mol_type = genomic DNA

SEQ ID NO: 58086 - DNA, 48 bp, Homo sapiens; identical to SEQ ID NO: 23915
  source 1..48: mol_type = genomic DNA

SEQ ID NO: 58087 - DNA, 48 bp, Homo sapiens; identical to SEQ ID NO: 7916
  source 1..48: mol_type = genomic DNA

SEQ ID NO: 58088 - DNA, 20 bp, Homo sapiens
  source 1..20: mol_type = genomic DNA
ggggatgtagctcagtggta

SEQ ID NO: 58089 - DNA, 48 bp, Homo sapiens; identical to SEQ ID NO: 3720
  source 1..48: mol_type = genomic DNA

SEQ ID NO: 58090 - DNA, 32 bp, Homo sapiens; identical to SEQ ID NO: 11353
  source 1..32: mol_type = genomic DNA

SEQ ID NO: 58091 - DNA, 48 bp, Homo sapiens; identical to SEQ ID NO: 6004
  source 1..48: mol_type = genomic DNA

SEQ ID NO: 58092 - DNA, 29 bp, Homo sapiens
  source 1..29: mol_type = genomic DNA
cataatctgaaggtcgtgagttcgagcct

SEQ ID NO: 58093 - DNA, 20 bp, Homo sapiens
  source 1..20: mol_type = genomic DNA
gtggttagtactctgcgttg

SEQ ID NO: 58094 - DNA, 32 bp, Homo sapiens; identical to SEQ ID NO: 11412
  source 1..32: mol_type = genomic DNA

SEQ ID NO: 58095 - DNA, 24 bp, Homo sapiens
  source 1..24: mol_type = genomic DNA
gcccggatagctcagtcggtagag

SEQ ID NO: 58096 - DNA, 30 bp, Homo sapiens; identical to SEQ ID NO: 10129
  source 1..30: mol_type = genomic DNA

SEQ ID NO: 58097 - DNA, 38 bp, Homo sapiens; identical to SEQ ID NO: 14505
  source 1..38: mol_type = genomic DNA

SEQ ID NO: 58098 - DNA, 40 bp, Homo sapiens; identical to SEQ ID NO: 19720
  source 1..40: mol_type = genomic DNA

SEQ ID NO: 58099 - DNA, 22 bp, Homo sapiens
  source 1..22: mol_type = genomic DNA
ttcgactcctggctggctcgcc

SEQ ID NO: 58100 - DNA, 32 bp, Homo sapiens; identical to SEQ ID NO: 25111
  source 1..32: mol_type = genomic DNA

SEQ ID NO: 58101 - DNA, 22 bp, Homo sapiens
  source 1..22: mol_type = genomic DNA
gaggtcgatggatcgaaaccat

SEQ ID NO: 58102 - DNA, 48 bp, Homo sapiens; identical to SEQ ID NO: 5318
  source 1..48: mol_type = genomic DNA

SEQ ID NO: 58103 - DNA, 29 bp, Homo sapiens
  source 1..29: mol_type = genomic DNA
ggctagctcagtcggtagagcatgggact

SEQ ID NO: 58104 - DNA, 32 bp, Homo sapiens; identical to SEQ ID NO: 12411
  source 1..32: mol_type = genomic DNA

SEQ ID NO: 58105 - DNA, 32 bp, Homo sapiens; identical to SEQ ID NO: 17588
  source 1..32: mol_type = genomic DNA

SEQ ID NO: 58106 - DNA, 48 bp, Homo sapiens; identical to SEQ ID NO: 9894
  source 1..48: mol_type = genomic DNA

SEQ ID NO: 58107 - DNA, 32 bp, Homo sapiens; identical to SEQ ID NO: 132
  source 1..32: mol_type = genomic DNA

SEQ ID NO: 58108 - DNA, 33 bp, Homo sapiens; identical to SEQ ID NO: 27100
  source 1..33: mol_type = genomic DNA

SEQ ID NO: 58109 - DNA, 21 bp, Homo sapiens
  source 1..21: mol_type = genomic DNA
atggttagcactctggactct

SEQ ID NO: 58110 - DNA, 22 bp, Homo sapiens
  source 1..22: mol_type = genomic DNA
ggttcaattccccgacggggag

SEQ ID NO: 58111 - DNA, 30 bp, Homo sapiens; identical to SEQ ID NO: 7329
  source 1..30: mol_type = genomic DNA

SEQ ID NO: 58112 - DNA, 30 bp, Homo sapiens; identical to SEQ ID NO: 27367
  source 1..30: mol_type = genomic DNA

SEQ ID NO: 58113 - DNA, 28 bp, Homo sapiens
  source 1..28: mol_type = genomic DNA
cgtagtgtagtggttatcacgttcgcct

SEQ ID NO: 58114 - DNA, 22 bp, Homo sapiens
  source 1..22: mol_type = genomic DNA
tatccattggtcttaggcccca

SEQ ID NO: 58115 - DNA, 17 bp, Homo sapiens
  source 1..17: mol_type = genomic DNA
cgtcaggatggccgagc

SEQ ID NO: 58116 - DNA, 17 bp, Homo sapiens
  source 1..17: mol_type = genomic DNA
gcggcccgggttcgatt

SEQ ID NO: 58117 - DNA, 30 bp, Homo sapiens; identical to SEQ ID NO: 22490
  source 1..30: mol_type = genomic DNA

SEQ ID NO: 58118 - DNA, 30 bp, Homo sapiens; identical to SEQ ID NO: 7557
  source 1..30: mol_type = genomic DNA

SEQ ID NO: 58119 - DNA, 20 bp, Homo sapiens
  source 1..20: mol_type = genomic DNA
ggttatcacattcgcctcac

SEQ ID NO: 58120 - DNA, 18 bp, Homo sapiens
  source 1..18: mol_type = genomic DNA
cgagtcccggcggagtcg

SEQ ID NO: 58121 - DNA, 35 bp, Homo sapiens; identical to SEQ ID NO: 20410
  source 1..35: mol_type = genomic DNA

SEQ ID NO: 58122 - DNA, 25 bp, Homo sapiens
  source 1..25: mol_type = genomic DNA
agtttaaattagaatcttagctttg

SEQ ID NO: 58123 - DNA, 48 bp, Homo sapiens; identical to SEQ ID NO: 22979
  source 1..48: mol_type = genomic DNA

SEQ ID NO: 58124 - DNA, 48 bp, Homo sapiens; identical to SEQ ID NO: 7997
  source 1..48: mol_type = genomic DNA

SEQ ID NO: 58125 - DNA, 24 bp, Homo sapiens
  source 1..24: mol_type = genomic DNA
gctcagtcggtagagcatgagact

SEQ ID NO: 58126 - DNA, 17 bp, Homo sapiens
  source 1..17: mol_type = genomic DNA
tggtctagtggttagga

SEQ ID NO: 58127 - DNA, 16 bp, Homo sapiens
  source 1..16: mol_type = genomic DNA
tggttcgagcccaccc

SEQ ID NO: 58128 - DNA, 30 bp, Homo sapiens; identical to SEQ ID NO: 16394
  source 1..30: mol_type = genomic DNA

SEQ ID NO: 58129 - DNA, 20 bp, Homo sapiens
  source 1..20: mol_type = genomic DNA
gtggttatcacgttcgcctc

SEQ ID NO: 58130 - DNA, 20 bp, Homo sapiens
  source 1..20: mol_type = genomic DNA
gtcagaggttcaattcctct

SEQ ID NO: 58131 - DNA, 20 bp, Homo sapiens
  source 1..20: mol_type = genomic DNA
gtggttatcacgttcgccta

SEQ ID NO: 58132 - DNA, 27 bp, Homo sapiens
  source 1..27: mol_type = genomic DNA
gcattggtggttcaatggtagaattct

SEQ ID NO: 58133 - DNA, 48 bp, Homo sapiens; identical to SEQ ID NO: 10367
  source 1..48: mol_type = genomic DNA

SEQ ID NO: 58134 - DNA, 48 bp, Homo sapiens; identical to SEQ ID NO: 545
  source 1..48: mol_type = genomic DNA

SEQ ID NO: 58135 - DNA, 31 bp, Homo sapiens; identical to SEQ ID NO: 24360
  source 1..31: mol_type = genomic DNA

SEQ ID NO: 58136 - DNA, 23 bp, Homo sapiens
  source 1..23: mol_type = genomic DNA
tggaggcgtgggttcgaatccca

SEQ ID NO: 58137 - DNA, 17 bp, Homo sapiens
  source 1..17: mol_type = genomic DNA
ggggatgtagctcagtg

SEQ ID NO: 58138 - DNA, 48 bp, Homo sapiens; identical to SEQ ID NO: 23238
  source 1..48: mol_type = genomic DNA

SEQ ID NO: 58139 - DNA, 26 bp, Homo sapiens
  source 1..26: mol_type = genomic DNA
ggttccatagtgtagtggttatcacg

SEQ ID NO: 58140 - DNA, 41 bp, Homo sapiens; identical to SEQ ID NO: 23001
  source 1..41: mol_type = genomic DNA

SEQ ID NO: 58141 - DNA, 18 bp, Homo sapiens
  source 1..18: mol_type = genomic DNA
aaccgggcagaaacacca

SEQ ID NO: 58142 - DNA, 21 bp, Homo sapiens
  source 1..21: mol_type = genomic DNA
gacttaagatccaatggacat

SEQ ID NO: 58143 - DNA, 24 bp, Homo sapiens
  source 1..24: mol_type = genomic DNA
tccaggttcgactcctggctggct

SEQ ID NO: 58144 - DNA, 48 bp, Homo sapiens; identical to SEQ ID NO: 9513
  source 1..48: mol_type = genomic DNA

SEQ ID NO: 58145 - DNA, 48 bp, Homo sapiens; identical to SEQ ID NO: 11026
  source 1..48: mol_type = genomic DNA

SEQ ID NO: 58146 - DNA, 40 bp, Homo sapiens; identical to SEQ ID NO: 25305
  source 1..40: mol_type = genomic DNA

SEQ ID NO: 58147 - DNA, 48 bp, Homo sapiens; identical to SEQ ID NO: 26362
  source 1..48: mol_type = genomic DNA

SEQ ID NO: 58148 - DNA, 16 bp, Homo sapiens
  source 1..16: mol_type = genomic DNA
gtggtatagtggtgag

SEQ ID NO: 58149 - DNA, 20 bp, Homo sapiens
  source 1..20: mol_type = genomic DNA
gctttgcacgtatgaggccc

SEQ ID NO: 58150 - DNA, 22 bp, Homo sapiens
  source 1..22: mol_type = genomic DNA
ccctcagtaagttgcaatactt

SEQ ID NO: 58151 - DNA, 27 bp, Homo sapiens
  source 1..27: mol_type = genomic DNA
tacactgaaaatgtttagacgggctca

SEQ ID NO: 58152 - DNA, 29 bp, Homo sapiens
  source 1..29: mol_type = genomic DNA
ctccctggtggtctagtggttaggattcg

SEQ ID NO: 58153 - DNA, 37 bp, Homo sapiens; identical to SEQ ID NO: 6724
  source 1..37: mol_type = genomic DNA

SEQ ID NO: 58154 - DNA, 25 bp, Homo sapiens
  source 1..25: mol_type = genomic DNA
gtgtagtggttatcacgttcgcctc

SEQ ID NO: 58155 - DNA, 21 bp, Homo sapiens
  source 1..21: mol_type = genomic DNA
cgatgcccgcatcctccacca

SEQ ID NO: 58156 - DNA, 29 bp, Homo sapiens
  source 1..29: mol_type = genomic DNA
tggaggcgtgggttcgaatcccacttctg

SEQ ID NO: 58157 - DNA, 48 bp, Homo sapiens; identical to SEQ ID NO: 2836
  source 1..48: mol_type = genomic DNA

SEQ ID NO: 58158 - DNA, 21 bp, Homo sapiens
  source 1..21: mol_type = genomic DNA
ggttccatagtgtagtggtta

SEQ ID NO: 58159 - DNA, 30 bp, Homo sapiens; identical to SEQ ID NO: 2590
  source 1..30: mol_type = genomic DNA

SEQ ID NO: 58160 - DNA, 28 bp, Homo sapiens
  source 1..28: mol_type = genomic DNA
gctagctcagtcggtagagcatgggact

SEQ ID NO: 58161 - DNA, 31 bp, Homo sapiens; identical to SEQ ID NO: 628
  source 1..31: mol_type = genomic DNA

SEQ ID NO: 58162 - DNA, 26 bp, Homo sapiens
  source 1..26: mol_type = genomic DNA
gtgtagtggttatcacgttcgcctca

SEQ ID NO: 58163 - DNA, 39 bp, Homo sapiens; identical to SEQ ID NO: 18109
  source 1..39: mol_type = genomic DNA

SEQ ID NO: 58164 - DNA, 30 bp, Homo sapiens; identical to SEQ ID NO: 12504
  source 1..30: mol_type = genomic DNA

SEQ ID NO: 58165 - DNA, 17 bp, Homo sapiens
  source 1..17: mol_type = genomic DNA
ggttagcgcgttcggct

SEQ ID NO: 58166 - DNA, 23 bp, Homo sapiens
  source 1..23: mol_type = genomic DNA
gttcgattcccgggcggcgcacc

SEQ ID NO: 58167 - DNA, 38 bp, Homo sapiens; identical to SEQ ID NO: 30362
  source 1..38: mol_type = genomic DNA

SEQ ID NO: 58168 - DNA, 19 bp, Homo sapiens
  source 1..19: mol_type = genomic DNA
cccattcttgcgacccggg

SEQ ID NO: 58169 - DNA, 30 bp, Homo sapiens; identical to SEQ ID NO: 5130
  source 1..30: mol_type = genomic DNA

SEQ ID NO: 58170 - DNA, 31 bp, Homo sapiens; identical to SEQ ID NO: 8886
  source 1..31: mol_type = genomic DNA

SEQ ID NO: 58171 - DNA, 29 bp, Homo sapiens
  source 1..29: mol_type = genomic DNA
ggattcctggttttcacccaggcggcccg

SEQ ID NO: 58172 - DNA, 22 bp, Homo sapiens
  source 1..22: mol_type = genomic DNA
gtggttatcacatctgctttac

SEQ ID NO: 58173 - DNA, 25 bp, Homo sapiens
  source 1..25: mol_type = genomic DNA
gctcagtcggtagagcatgagaccc

SEQ ID NO: 58174 - DNA, 48 bp, Homo sapiens; identical to SEQ ID NO: 8201
  source 1..48: mol_type = genomic DNA

SEQ ID NO: 58175 - DNA, 48 bp, Homo sapiens; identical to SEQ ID NO: 30477
  source 1..48: mol_type = genomic DNA

SEQ ID NO: 58176 - DNA, 34 bp, Homo sapiens; identical to SEQ ID NO: 12822
  source 1..34: mol_type = genomic DNA

SEQ ID NO: 58177 - DNA, 18 bp, Homo sapiens
  source 1..18: mol_type = genomic DNA
cccaacttacacttagga

SEQ ID NO: 58178 - DNA, 16 bp, Homo sapiens
  source 1..16: mol_type = genomic DNA
tccaggtgccccctcc

SEQ ID NO: 58179 - DNA, 34 bp, Homo sapiens; identical to SEQ ID NO: 28804
  source 1..34: mol_type = genomic DNA

SEQ ID NO: 58180 - DNA, 48 bp, Homo sapiens; identical to SEQ ID NO: 16352
  source 1..48: mol_type = genomic DNA

SEQ ID NO: 58181 - DNA, 31 bp, Homo sapiens; identical to SEQ ID NO: 17920
  source 1..31: mol_type = genomic DNA

SEQ ID NO: 58182 - DNA, 27 bp, Homo sapiens
  source 1..27: mol_type = genomic DNA
ggggcgtgggttcgaatcccaccgctg

SEQ ID NO: 58183 - DNA, 20 bp, Homo sapiens
  source 1..20: mol_type = genomic DNA
tgtagtggtcatcacgttcg

SEQ ID NO: 58184 - DNA, 28 bp, Homo sapiens
  source 1..28: mol_type = genomic DNA
gagatttcaacttaacttgaccgctctg

SEQ ID NO: 58185 - DNA, 18 bp, Homo sapiens
  source 1..18: mol_type = genomic DNA
ctttgatagagtaaataa

SEQ ID NO: 58186 - DNA, 48 bp, Homo sapiens; identical to SEQ ID NO: 13764
  source 1..48: mol_type = genomic DNA

SEQ ID NO: 58187 - DNA, 28 bp, Homo sapiens
  source 1..28: mol_type = genomic DNA
atcgtatagtggttagtactctgcgttg

SEQ ID NO: 58188 - DNA, 47 bp, Homo sapiens; identical to SEQ ID NO: 29124
  source 1..47: mol_type = genomic DNA

SEQ ID NO: 58189 - DNA, 24 bp, Homo sapiens
  source 1..24: mol_type = genomic DNA
ccggatagctcagtcggtagagca

SEQ ID NO: 58190 - DNA, 32 bp, Homo sapiens; identical to SEQ ID NO: 21510
  source 1..32: mol_type = genomic DNA

SEQ ID NO: 58191 - DNA, 40 bp, Homo sapiens; identical to SEQ ID NO: 19702
  source 1..40: mol_type = genomic DNA

SEQ ID NO: 58192 - DNA, 19 bp, Homo sapiens
  source 1..19: mol_type = genomic DNA
gggatgtagctcagtggta

SEQ ID NO: 58193 - DNA, 16 bp, Homo sapiens
  source 1..16: mol_type = genomic DNA
gttatcacatctgctt

SEQ ID NO: 58194 - DNA, 43 bp, Homo sapiens; identical to SEQ ID NO: 16650
  source 1..43: mol_type = genomic DNA

SEQ ID NO: 58195 - DNA, 46 bp, Homo sapiens; identical to SEQ ID NO: 2803
  source 1..46: mol_type = genomic DNA

SEQ ID NO: 58196 - DNA, 25 bp, Homo sapiens
  source 1..25: mol_type = genomic DNA
agtgtagtggttatcacgttcgcct

SEQ ID NO: 58197 - DNA, 20 bp, Homo sapiens
  source 1..20: mol_type = genomic DNA
taggggtatgattctcgctt

SEQ ID NO: 58198 - DNA, 19 bp, Homo sapiens
  source 1..19: mol_type = genomic DNA
gactttgaatccagcgatc

SEQ ID NO: 58199 - DNA, 32 bp, Homo sapiens; identical to SEQ ID NO: 7775
  source 1..32: mol_type = genomic DNA

SEQ ID NO: 58200 - DNA, 40 bp, Homo sapiens; identical to SEQ ID NO: 10736
  source 1..40: mol_type = genomic DNA

SEQ ID NO: 58201 - DNA, 30 bp, Homo sapiens; identical to SEQ ID NO: 25643
  source 1..30: mol_type = genomic DNA

SEQ ID NO: 58202 - DNA, 31 bp, Homo sapiens; identical to SEQ ID NO: 15076
  source 1..31: mol_type = genomic DNA

SEQ ID NO: 58203 - DNA, 48 bp, Homo sapiens; identical to SEQ ID NO: 24993
  source 1..48: mol_type = genomic DNA

SEQ ID NO: 58204 - DNA, 25 bp, Homo sapiens
  source 1..25: mol_type = genomic DNA
caatacactgaaaatgtttagacgg

SEQ ID NO: 58205 - DNA, 48 bp, Homo sapiens; identical to SEQ ID NO: 12102
  source 1..48: mol_type = genomic DNA

SEQ ID NO: 58206 - DNA, 29 bp, Homo sapiens
  source 1..29: mol_type = genomic DNA
cagcggaagcgtgctgggcccataaccca

SEQ ID NO: 58207 - DNA, 48 bp, Homo sapiens; identical to SEQ ID NO: 6415
  source 1..48: mol_type = genomic DNA

SEQ ID NO: 58208 - DNA, 17 bp, Homo sapiens
  source 1..17: mol_type = genomic DNA
gccccgggttcgatccc

SEQ ID NO: 58209 - DNA, 35 bp, Homo sapiens; identical to SEQ ID NO: 25187
  source 1..35: mol_type = genomic DNA

SEQ ID NO: 58210 - DNA, 19 bp, Homo sapiens
  source 1..19: mol_type = genomic DNA
gggtggttcagtggtagaa

SEQ ID NO: 58211 - DNA, 32 bp, Homo sapiens; identical to SEQ ID NO: 31106
  source 1..32: mol_type = genomic DNA

SEQ ID NO: 58212 - DNA, 48 bp, Homo sapiens; identical to SEQ ID NO: 16071
  source 1..48: mol_type = genomic DNA

SEQ ID NO: 58213 - DNA, 25 bp, Homo sapiens
  source 1..25: mol_type = genomic DNA
gtttccgtagtgtagtggttatcac

SEQ ID NO: 58214 - DNA, 37 bp, Homo sapiens; identical to SEQ ID NO: 1427
  source 1..37: mol_type = genomic DNA

SEQ ID NO: 58215 - DNA, 30 bp, Homo sapiens; identical to SEQ ID NO: 8321
  source 1..30: mol_type = genomic DNA

SEQ ID NO: 58216 - DNA, 25 bp, Homo sapiens
  source 1..25: mol_type = genomic DNA
ggaagcgtgctgggcccataaccca

SEQ ID NO: 58217 - DNA, 31 bp, Homo sapiens; identical to SEQ ID NO: 26321
  source 1..31: mol_type = genomic DNA

SEQ ID NO: 58218 - DNA, 17 bp, Homo sapiens
  source 1..17: mol_type = genomic DNA
aatggtaagcactctgg

SEQ ID NO: 58219 - DNA, 21 bp, Homo sapiens
  source 1..21: mol_type = genomic DNA
gctaaatcctatatatcttac

SEQ ID NO: 58220 - DNA, 31 bp, Homo sapiens; identical to SEQ ID NO: 21139
  source 1..31: mol_type = genomic DNA

SEQ ID NO: 58221 - DNA, 21 bp, Homo sapiens
  source 1..21: mol_type = genomic DNA
tctagcggttaggattcctgg

SEQ ID NO: 58222 - DNA, 47 bp, Homo sapiens; identical to SEQ ID NO: 816
  source 1..47: mol_type = genomic DNA

SEQ ID NO: 58223 - DNA, 17 bp, Homo sapiens
  source 1..17: mol_type = genomic DNA
tctcatagtcctagcca

SEQ ID NO: 58224 - DNA, 18 bp, Homo sapiens
  source 1..18: mol_type = genomic DNA
aatggtagaattctcgcc

SEQ ID NO: 58225 - DNA, 32 bp, Homo sapiens; identical to SEQ ID NO: 11544
  source 1..32: mol_type = genomic DNA

SEQ ID NO: 58226 - DNA, 26 bp, Homo sapiens
  source 1..26: mol_type = genomic DNA
ctaatggtggagttaaagactttttc

SEQ ID NO: 58227 - DNA, 48 bp, Homo sapiens; identical to SEQ ID NO: 15058
  source 1..48: mol_type = genomic DNA

SEQ ID NO: 58228 - DNA, 23 bp, Homo sapiens
  source 1..23: mol_type = genomic DNA
gtagtggttatcacgtctgcttt

SEQ ID NO: 58229 - DNA, 18 bp, Homo sapiens
  source 1..18: mol_type = genomic DNA
tcggtagagcatgagacc

SEQ ID NO: 58230 - DNA, 26 bp, Homo sapiens
  source 1..26: mol_type = genomic DNA
tcacacgcgaaaggtccccggttcga

SEQ ID NO: 58231 - DNA, 23 bp, Homo sapiens
  source 1..23: mol_type = genomic DNA
gtgtagtggttatcacgttcgcc

SEQ ID NO: 58232 - DNA, 37 bp, Homo sapiens; identical to SEQ ID NO: 14327
  source 1..37: mol_type = genomic DNA

SEQ ID NO: 58233 - DNA, 35 bp, Homo sapiens; identical to SEQ ID NO: 25357
  source 1..35: mol_type = genomic DNA

SEQ ID NO: 58234 - DNA, 16 bp, Homo sapiens
  source 1..16: mol_type = genomic DNA
gttcgagcctcacctg

SEQ ID NO: 58235 - DNA, 48 bp, Homo sapiens; identical to SEQ ID NO: 24607
  source 1..48: mol_type = genomic DNA

SEQ ID NO: 58236 - DNA, 19 bp, Homo sapiens
  source 1..19: mol_type = genomic DNA
ggccgcgtggcctaatgga

SEQ ID NO: 58237 - DNA, 16 bp, Homo sapiens
  source 1..16: mol_type = genomic DNA
ggtcccatggtgtaat

SEQ ID NO: 58238 - DNA, 48 bp, Homo sapiens; identical to SEQ ID NO: 59
  source 1..48: mol_type = genomic DNA

SEQ ID NO: 58239 - DNA, 28 bp, Homo sapiens
  source 1..28: mol_type = genomic DNA
ttggcctcctaagccagggattgtgggt

SEQ ID NO: 58240 - DNA, 27 bp, Homo sapiens
  source 1..27: mol_type = genomic DNA
aggcatcagcctccggagctggggatt

SEQ ID NO: 58241 - DNA, 48 bp, Homo sapiens; identical to SEQ ID NO: 26979
  source 1..48: mol_type = genomic DNA

SEQ ID NO: 58242 - DNA, 32 bp, Homo sapiens; identical to SEQ ID NO: 14659
  source 1..32: mol_type = genomic DNA

SEQ ID NO: 58243 - DNA, 37 bp, Homo sapiens; identical to SEQ ID NO: 10990
  source 1..37: mol_type = genomic DNA

SEQ ID NO: 58244 - DNA, 33 bp, Homo sapiens; identical to SEQ ID NO: 19576
  source 1..33: mol_type = genomic DNA

SEQ ID NO: 58245 - DNA, 29 bp, Homo sapiens
  source 1..29: mol_type = genomic DNA
agaaagctcacaagaactgctaactcatg

SEQ ID NO: 58246 - DNA, 39 bp, Homo sapiens; identical to SEQ ID NO: 22579
  source 1..39: mol_type = genomic DNA

SEQ ID NO: 58247 - DNA, 27 bp, Homo sapiens
  source 1..27: mol_type = genomic DNA
tcgtatagtggttagtactctgcgttg

SEQ ID NO: 58248 - DNA, 16 bp, Homo sapiens
  source 1..16: mol_type = genomic DNA
gttatacccttcccgt

SEQ ID NO: 58249 - DNA, 42 bp, Homo sapiens; identical to SEQ ID NO: 23928
  source 1..42: mol_type = genomic DNA

SEQ ID NO: 58250 - DNA, 48 bp, Homo sapiens; identical to SEQ ID NO: 22238
  source 1..48: mol_type = genomic DNA

SEQ ID NO: 58251 - DNA, 20 bp, Homo sapiens
  source 1..20: mol_type = genomic DNA
gggggattagctcaaatggt

SEQ ID NO: 58252 - DNA, 37 bp, Homo sapiens; identical to SEQ ID NO: 2770
  source 1..37: mol_type = genomic DNA

SEQ ID NO: 58253 - DNA, 48 bp, Homo sapiens; identical to SEQ ID NO: 1020
  source 1..48: mol_type = genomic DNA

SEQ ID NO: 58254 - DNA, 17 bp, Homo sapiens
  source 1..17: mol_type = genomic DNA
gttttgcagtccttacc

SEQ ID NO: 58255 - DNA, 40 bp, Homo sapiens; identical to SEQ ID NO: 2342
  source 1..40: mol_type = genomic DNA

SEQ ID NO: 58256 - DNA, 19 bp, Homo sapiens
  source 1..19: mol_type = genomic DNA
taggattcggcgctttcac

SEQ ID NO: 58257 - DNA, 29 bp, Homo sapiens
  source 1..29: mol_type = genomic DNA
ttggtctaggggtatgattctcgctttgg

SEQ ID NO: 58258 - DNA, 18 bp, Homo sapiens
  source 1..18: mol_type = genomic DNA
aaccgagcggaaacacca

SEQ ID NO: 58259 - DNA, 32 bp, Homo sapiens; identical to SEQ ID NO: 26542
  source 1..32: mol_type = genomic DNA

SEQ ID NO: 58260 - DNA, 17 bp, Homo sapiens
  source 1..17: mol_type = genomic DNA
aatagtaccgttaactt

SEQ ID NO: 58261 - DNA, 29 bp, Homo sapiens
  source 1..29: mol_type = genomic DNA
gtcggtagagcatgggactcttaatccca

SEQ ID NO: 58262 - DNA, 17 bp, Homo sapiens
  source 1..17: mol_type = genomic DNA
aaccgggcagaaacacc

SEQ ID NO: 58263 - DNA, 22 bp, Homo sapiens
  source 1..22: mol_type = genomic DNA
tagtggttagtactctgcgttg

SEQ ID NO: 58264 - DNA, 42 bp, Homo sapiens; identical to SEQ ID NO: 25488
  source 1..42: mol_type = genomic DNA

SEQ ID NO: 58265 - DNA, 17 bp, Homo sapiens
  source 1..17: mol_type = genomic DNA
aaccgagcggaaacacc

SEQ ID NO: 58266 - DNA, 33 bp, Homo sapiens; identical to SEQ ID NO: 23457
  source 1..33: mol_type = genomic DNA

SEQ ID NO: 58267 - DNA, 16 bp, Homo sapiens
  source 1..16: mol_type = genomic DNA
atagctcagtggtaga

SEQ ID NO: 58268 - DNA, 46 bp, Homo sapiens; identical to SEQ ID NO: 13307
  source 1..46: mol_type = genomic DNA

SEQ ID NO: 58269 - DNA, 48 bp, Homo sapiens; identical to SEQ ID NO: 222
  source 1..48: mol_type = genomic DNA

SEQ ID NO: 58270 - DNA, 48 bp, Homo sapiens; identical to SEQ ID NO: 998
  source 1..48: mol_type = genomic DNA

SEQ ID NO: 58271 - DNA, 23 bp, Homo sapiens
  source 1..23: mol_type = genomic DNA
ggggatgtagctcagtggtagag

SEQ ID NO: 58272 - DNA, 18 bp, Homo sapiens
  source 1..18: mol_type = genomic DNA
ggttagtactctgcgttg

SEQ ID NO: 58273 - DNA, 24 bp, Homo sapiens
  source 1..24: mol_type = genomic DNA
tatagtggttagtactctgcgttg

SEQ ID NO: 58274 - DNA, 21 bp, Homo sapiens
  source 1..21: mol_type = genomic DNA
aaccggagatgaaaacctttt

SEQ ID NO: 58275 - DNA, 33 bp, Homo sapiens; identical to SEQ ID NO: 449
  source 1..33: mol_type = genomic DNA

SEQ ID NO: 58276 - DNA, 48 bp, Homo sapiens; identical to SEQ ID NO: 3325
  source 1..48: mol_type = genomic DNA

SEQ ID NO: 58277 - DNA, 23 bp, Homo sapiens
  source 1..23: mol_type = genomic DNA
ttagtactctgcgttgtggccgc

SEQ ID NO: 58278 - DNA, 33 bp, Homo sapiens; identical to SEQ ID NO: 17570
  source 1..33: mol_type = genomic DNA

SEQ ID NO: 58279 - DNA, 23 bp, Homo sapiens
  source 1..23: mol_type = genomic DNA
cagtcggtagagcatgggactct

SEQ ID NO: 58280 - DNA, 28 bp, Homo sapiens
  source 1..28: mol_type = genomic DNA
tatagtttaaccaaaacatcagattgtg

SEQ ID NO: 58281 - DNA, 27 bp, Homo sapiens
  source 1..27: mol_type = genomic DNA
gggagaccggggttcgattccccgacg

SEQ ID NO: 58282 - DNA, 21 bp, Homo sapiens
  source 1..21: mol_type = genomic DNA
gggctcacatcaccccataaa

SEQ ID NO: 58283 - DNA, 31 bp, Homo sapiens; identical to SEQ ID NO: 16238
  source 1..31: mol_type = genomic DNA

SEQ ID NO: 58284 - DNA, 46 bp, Homo sapiens; identical to SEQ ID NO: 29176
  source 1..46: mol_type = genomic DNA

SEQ ID NO: 58285 - DNA, 29 bp, Homo sapiens
  source 1..29: mol_type = genomic DNA
ttcatatcattggtcgtggttgtagtccg

SEQ ID NO: 58286 - DNA, 36 bp, Homo sapiens; identical to SEQ ID NO: 6344
  source 1..36: mol_type = genomic DNA

SEQ ID NO: 58287 - DNA, 36 bp, Homo sapiens; identical to SEQ ID NO: 11445
  source 1..36: mol_type = genomic DNA

SEQ ID NO: 58288 - DNA, 46 bp, Homo sapiens; identical to SEQ ID NO: 27701
  source 1..46: mol_type = genomic DNA

SEQ ID NO: 58289 - DNA, 19 bp, Homo sapiens
  source 1..19: mol_type = genomic DNA
gcggttaggattcctggtt

SEQ ID NO: 58290 - DNA, 24 bp, Homo sapiens
  source 1..24: mol_type = genomic DNA
tcagtcggtagagcatcagacttt

SEQ ID NO: 58291 - DNA, 48 bp, Homo sapiens; identical to SEQ ID NO: 29305
  source 1..48: mol_type = genomic DNA

SEQ ID NO: 58292 - DNA, 21 bp, Homo sapiens
  source 1..21: mol_type = genomic DNA
agttcgagtctcggtggaacc

SEQ ID NO: 58293 - DNA, 48 bp, Homo sapiens; identical to SEQ ID NO: 6383
  source 1..48: mol_type = genomic DNA

SEQ ID NO: 58294 - DNA, 33 bp, Homo sapiens; identical to SEQ ID NO: 6748
  source 1..33: mol_type = genomic DNA

SEQ ID NO: 58295 - DNA, 33 bp, Homo sapiens; identical to SEQ ID NO: 27144
  source 1..33: mol_type = genomic DNA

SEQ ID NO: 58296 - DNA, 48 bp, Homo sapiens; identical to SEQ ID NO: 6258
  source 1..48: mol_type = genomic DNA

SEQ ID NO: 58297 - DNA, 16 bp, Homo sapiens
  source 1..16: mol_type = genomic DNA
accccttatttacccc

SEQ ID NO: 58298 - DNA, 22 bp, Homo sapiens
  source 1..22: mol_type = genomic DNA
ttcgattctcatagtcctagcc

SEQ ID NO: 58299 - DNA, 28 bp, Homo sapiens
  source 1..28: mol_type = genomic DNA
gtagcttacctcctcaaagcaatacact

SEQ ID NO: 58300 - DNA, 23 bp, Homo sapiens
  source 1..23: mol_type = genomic DNA
taaaccgaagatcacgggttcga

SEQ ID NO: 58301 - DNA, 38 bp, Homo sapiens; identical to SEQ ID NO: 23348
  source 1..38: mol_type = genomic DNA

SEQ ID NO: 58302 - DNA, 30 bp, Homo sapiens; identical to SEQ ID NO: 6995
  source 1..30: mol_type = genomic DNA

SEQ ID NO: 58303 - DNA, 30 bp, Homo sapiens; identical to SEQ ID NO: 4209
  source 1..30: mol_type = genomic DNA

SEQ ID NO: 58304 - DNA, 25 bp, Homo sapiens
  source 1..25: mol_type = genomic DNA
gtatagtggttagtactctgcgttg

SEQ ID NO: 58305 - DNA, 48 bp, Homo sapiens; identical to SEQ ID NO: 12483
  source 1..48: mol_type = genomic DNA

SEQ ID NO: 58306 - DNA, 33 bp, Homo sapiens; identical to SEQ ID NO: 6349
  source 1..33: mol_type = genomic DNA

SEQ ID NO: 58307 - DNA, 20 bp, Homo sapiens
  source 1..20: mol_type = genomic DNA
tagtggttatcacgtctgct

SEQ ID NO: 58308 - DNA, 19 bp, Homo sapiens
  source 1..19: mol_type = genomic DNA
aacacaaagcacccaactt

SEQ ID NO: 58309 - DNA, 33 bp, Homo sapiens; identical to SEQ ID NO: 15757
  source 1..33: mol_type = genomic DNA

SEQ ID NO: 58310 - DNA, 21 bp, Homo sapiens
  source 1..21: mol_type = genomic DNA
gcgttggtggtatagtggtta

SEQ ID NO: 58311 - DNA, 31 bp, Homo sapiens; identical to SEQ ID NO: 15203
  source 1..31: mol_type = genomic DNA

SEQ ID NO: 58312 - DNA, 19 bp, Homo sapiens
  source 1..19: mol_type = genomic DNA
tcgaatcccatcctcgtcg

SEQ ID NO: 58313 - DNA, 45 bp, Homo sapiens; identical to SEQ ID NO: 17637
  source 1..45: mol_type = genomic DNA

SEQ ID NO: 58314 - DNA, 38 bp, Homo sapiens; identical to SEQ ID NO: 25440
  source 1..38: mol_type = genomic DNA

SEQ ID NO: 58315 - DNA, 48 bp, Homo sapiens; identical to SEQ ID NO: 16935
  source 1..48: mol_type = genomic DNA

SEQ ID NO: 58316 - DNA, 34 bp, Homo sapiens; identical to SEQ ID NO: 22537
  source 1..34: mol_type = genomic DNA

SEQ ID NO: 58317 - DNA, 18 bp, Homo sapiens
  source 1..18: mol_type = genomic DNA
ttcgattcccgggcggcg

SEQ ID NO: 58318 - DNA, 16 bp, Homo sapiens
  source 1..16: mol_type = genomic DNA
ccagtggcctaatgga

SEQ ID NO: 58319 - DNA, 24 bp, Homo sapiens
  source 1..24: mol_type = genomic DNA
gctcagtcggtagagcatgggact

SEQ ID NO: 58320 - DNA, 37 bp, Homo sapiens; identical to SEQ ID NO: 911
  source 1..37: mol_type = genomic DNA

SEQ ID NO: 58321 - DNA, 27 bp, Homo sapiens
  source 1..27: mol_type = genomic DNA
atcgggcccataccccgaaaatgttgg

SEQ ID NO: 58322 - DNA, 34 bp, Homo sapiens; identical to SEQ ID NO: 8039
  source 1..34: mol_type = genomic DNA

SEQ ID NO: 58323 - DNA, 27 bp, Homo sapiens
  source 1..27: mol_type = genomic DNA
atggttagcactctggactttgaatcc

SEQ ID NO: 58324 - DNA, 37 bp, Homo sapiens; identical to SEQ ID NO: 4001
  source 1..37: mol_type = genomic DNA

SEQ ID NO: 58325 - DNA, 24 bp, Homo sapiens
  source 1..24: mol_type = genomic DNA
ggtgtaatggttagcactctggac

SEQ ID NO: 58326 - DNA, 17 bp, Homo sapiens
  source 1..17: mol_type = genomic DNA
aagattaagagaaccaa

SEQ ID NO: 58327 - DNA, 20 bp, Homo sapiens
  source 1..20: mol_type = genomic DNA
tagcactctggactttgaat

SEQ ID NO: 58328 - DNA, 20 bp, Homo sapiens
  source 1..20: mol_type = genomic DNA
tggtgagtatccccgcctgt

SEQ ID NO: 58329 - DNA, 16 bp, Homo sapiens
  source 1..16: mol_type = genomic DNA
gtcaggatggccgagc

SEQ ID NO: 58330 - DNA, 31 bp, Homo sapiens; identical to SEQ ID NO: 2621
  source 1..31: mol_type = genomic DNA

SEQ ID NO: 58331 - DNA, 22 bp, Homo sapiens
  source 1..22: mol_type = genomic DNA
gacttaagatccaatggacata

SEQ ID NO: 58332 - DNA, 24 bp, Homo sapiens
  source 1..24: mol_type = genomic DNA
ggttcgactcctggctggctcgcc

SEQ ID NO: 58333 - DNA, 24 bp, Homo sapiens
  source 1..24: mol_type = genomic DNA
taggattcctggttttcacccagg

SEQ ID NO: 58334 - DNA, 35 bp, Homo sapiens; identical to SEQ ID NO: 1919
  source 1..35: mol_type = genomic DNA

SEQ ID NO: 58335 - DNA, 25 bp, Homo sapiens
  source 1..25: mol_type = genomic DNA
cgctggttcgaatccggctcggagg

SEQ ID NO: 58336 - DNA, 33 bp, Homo sapiens; identical to SEQ ID NO: 27269
  source 1..33: mol_type = genomic DNA

SEQ ID NO: 58337 - DNA, 23 bp, Homo sapiens
  source 1..23: mol_type = genomic DNA
atagtggttagtactctgcgttg

SEQ ID NO: 58338 - DNA, 42 bp, Homo sapiens; identical to SEQ ID NO: 17025
  source 1..42: mol_type = genomic DNA

SEQ ID NO: 58339 - DNA, 29 bp, Homo sapiens
  source 1..29: mol_type = genomic DNA
gccgcggcccgggttcgattcccggtcag

SEQ ID NO: 58340 - DNA, 26 bp, Homo sapiens
  source 1..26: mol_type = genomic DNA
gctcagtcggtagagcatgagactct

SEQ ID NO: 58341 - DNA, 26 bp, Homo sapiens
  source 1..26: mol_type = genomic DNA
gcgttggtggtatagtggtaagcata

SEQ ID NO: 58342 - DNA, 48 bp, Homo sapiens; identical to SEQ ID NO: 8801
  source 1..48: mol_type = genomic DNA

SEQ ID NO: 58343 - DNA, 23 bp, Homo sapiens
  source 1..23: mol_type = genomic DNA
gggttaggcctctttttaccacc

SEQ ID NO: 58344 - DNA, 21 bp, Homo sapiens
  source 1..21: mol_type = genomic DNA
gtggttagtactctgcgttgt

SEQ ID NO: 58345 - DNA, 34 bp, Homo sapiens; identical to SEQ ID NO: 15099
  source 1..34: mol_type = genomic DNA

SEQ ID NO: 58346 - DNA, 19 bp, Homo sapiens
  source 1..19: mol_type = genomic DNA
agtggttagtactctgcgt

SEQ ID NO: 58347 - DNA, 21 bp, Homo sapiens
  source 1..21: mol_type = genomic DNA
aacattcaaaaaagagtacca

SEQ ID NO: 58348 - DNA, 48 bp, Homo sapiens; identical to SEQ ID NO: 10752
  source 1..48: mol_type = genomic DNA

SEQ ID NO: 58349 - DNA, 22 bp, Homo sapiens
  source 1..22: mol_type = genomic DNA
tcgaatccgagtcacggcacca

SEQ ID NO: 58350 - DNA, 18 bp, Homo sapiens
  source 1..18: mol_type = genomic DNA
ttccaagcagttgacccg

SEQ ID NO: 58351 - DNA, 18 bp, Homo sapiens
  source 1..18: mol_type = genomic DNA
gttaactaagtgtttgtg

SEQ ID NO: 58352 - DNA, 21 bp, Homo sapiens
  source 1..21: mol_type = genomic DNA
tcgagtcccaccagagtcgcc

SEQ ID NO: 58353 - DNA, 16 bp, Homo sapiens
  source 1..16: mol_type = genomic DNA
gtcaggatggccgagt

SEQ ID NO: 58354 - DNA, 31 bp, Homo sapiens; identical to SEQ ID NO: 10702
  source 1..31: mol_type = genomic DNA

SEQ ID NO: 58355 - DNA, 18 bp, Homo sapiens
  source 1..18: mol_type = genomic DNA
ggatggccgagtggtcta

SEQ ID NO: 58356 - DNA, 23 bp, Homo sapiens
  source 1..23: mol_type = genomic DNA
taagagaaccaacacctctttac

SEQ ID NO: 58357 - DNA, 36 bp, Homo sapiens; identical to SEQ ID NO: 29577
  source 1..36: mol_type = genomic DNA

SEQ ID NO: 58358 - DNA, 48 bp, Homo sapiens; identical to SEQ ID NO: 23932
  source 1..48: mol_type = genomic DNA

SEQ ID NO: 58359 - DNA, 23 bp, Homo sapiens
  source 1..23: mol_type = genomic DNA
tcggtagagcatgggactcttaa

SEQ ID NO: 58360 - DNA, 23 bp, Homo sapiens
  source 1..23: mol_type = genomic DNA
tagtggctaggattcggcgcttt

SEQ ID NO: 58361 - DNA, 29 bp, Homo sapiens
  source 1..29: mol_type = genomic DNA
gagtggcgcagcggaagcgtgctgggccc

SEQ ID NO: 58362 - DNA, 42 bp, Homo sapiens; identical to SEQ ID NO: 13423
  source 1..42: mol_type = genomic DNA

SEQ ID NO: 58363 - DNA, 16 bp, Homo sapiens
  source 1..16: mol_type = genomic DNA
cccacctggggtgcca

SEQ ID NO: 58364 - DNA, 29 bp, Homo sapiens
  source 1..29: mol_type = genomic DNA
tgggtggttcagtggtagaattctcgcct

SEQ ID NO: 58365 - DNA, 29 bp, Homo sapiens
  source 1..29: mol_type = genomic DNA
cgtagtgtagtggttatcacgttcgcctc

SEQ ID NO: 58366 - DNA, 30 bp, Homo sapiens; identical to SEQ ID NO: 3403
  source 1..30: mol_type = genomic DNA

SEQ ID NO: 58367 - DNA, 48 bp, Homo sapiens; identical to SEQ ID NO: 4702
  source 1..48: mol_type = genomic DNA

SEQ ID NO: 58368 - DNA, 31 bp, Homo sapiens; identical to SEQ ID NO: 30294
  source 1..31: mol_type = genomic DNA

SEQ ID NO: 58369 - DNA, 24 bp, Homo sapiens
  source 1..24: mol_type = genomic DNA
gcggcccgggttcgattcccggtc

SEQ ID NO: 58370 - DNA, 31 bp, Homo sapiens; identical to SEQ ID NO: 10931
  source 1..31: mol_type = genomic DNA

SEQ ID NO: 58371 - DNA, 26 bp, Homo sapiens
  source 1..26: mol_type = genomic DNA
tagtgtagtggtcatcacgttcgcct

SEQ ID NO: 58372 - DNA, 41 bp, Homo sapiens; identical to SEQ ID NO: 13897
  source 1..41: mol_type = genomic DNA

SEQ ID NO: 58373 - DNA, 46 bp, Homo sapiens; identical to SEQ ID NO: 19946
  source 1..46: mol_type = genomic DNA

SEQ ID NO: 58374 - DNA, 48 bp, Homo sapiens; identical to SEQ ID NO: 29337
  source 1..48: mol_type = genomic DNA

SEQ ID NO: 58375 - DNA, 19 bp, Homo sapiens
  source 1..19: mol_type = genomic DNA
gttcaatccccggcatctc

SEQ ID NO: 58376 - DNA, 28 bp, Homo sapiens
  source 1..28: mol_type = genomic DNA
agaaagctcacaagaactgctaactcat

SEQ ID NO: 58377 - DNA, 30 bp, Homo sapiens; identical to SEQ ID NO: 15062
  source 1..30: mol_type = genomic DNA

SEQ ID NO: 58378 - DNA, 21 bp, Homo sapiens
  source 1..21: mol_type = genomic DNA
cgattctcatagtcctagcca

SEQ ID NO: 58379 - DNA, 48 bp, Homo sapiens; identical to SEQ ID NO: 2491
  source 1..48: mol_type = genomic DNA

SEQ ID NO: 58380 - DNA, 17 bp, Homo sapiens
  source 1..17: mol_type = genomic DNA
cctcctcaaagcaatac

SEQ ID NO: 58381 - DNA, 25 bp, Homo sapiens
  source 1..25: mol_type = genomic DNA
cagtcggtagagcatgagactctta

SEQ ID NO: 58382 - DNA, 19 bp, Homo sapiens
  source 1..19: mol_type = genomic DNA
gttcgattccccgacgggg

SEQ ID NO: 58383 - DNA, 16 bp, Homo sapiens
  source 1..16: mol_type = genomic DNA
agagaaccaacacctc

SEQ ID NO: 58384 - DNA, 48 bp, Homo sapiens; identical to SEQ ID NO: 1823
  source 1..48: mol_type = genomic DNA

SEQ ID NO: 58385 - DNA, 34 bp, Homo sapiens; identical to SEQ ID NO: 783
  source 1..34: mol_type = genomic DNA

SEQ ID NO: 58386 - DNA, 30 bp, Homo sapiens; identical to SEQ ID NO: 7630
  source 1..30: mol_type = genomic DNA

SEQ ID NO: 58387 - DNA, 35 bp, Homo sapiens; identical to SEQ ID NO: 8131
  source 1..35: mol_type = genomic DNA

SEQ ID NO: 58388 - DNA, 33 bp, Homo sapiens; identical to SEQ ID NO: 30192
  source 1..33: mol_type = genomic DNA

SEQ ID NO: 58389 - DNA, 26 bp, Homo sapiens
  source 1..26: mol_type = genomic DNA
cagtcggtagagcatgagacccttaa

SEQ ID NO: 58390 - DNA, 42 bp, Homo sapiens; identical to SEQ ID NO: 9544
  source 1..42: mol_type = genomic DNA

SEQ ID NO: 58391 - DNA, 27 bp, Homo sapiens
  source 1..27: mol_type = genomic DNA
tagctcagtcggtagagcatgagaccc

SEQ ID NO: 58392 - DNA, 42 bp, Homo sapiens; identical to SEQ ID NO: 25918
  source 1..42: mol_type = genomic DNA

SEQ ID NO: 58393 - DNA, 48 bp, Homo sapiens; identical to SEQ ID NO: 30397
  source 1..48: mol_type = genomic DNA

SEQ ID NO: 58394 - DNA, 23 bp, Homo sapiens
  source 1..23: mol_type = genomic DNA
ttcgattctcatagtcctagcca

SEQ ID NO: 58395 - DNA, 20 bp, Homo sapiens
  source 1..20: mol_type = genomic DNA
taagtcccattggtctagcc

SEQ ID NO: 58396 - DNA, 23 bp, Homo sapiens
  source 1..23: mol_type = genomic DNA
gttatcacgtctgctttacacgc

SEQ ID NO: 58397 - DNA, 27 bp, Homo sapiens
  source 1..27: mol_type = genomic DNA
tggttagcactctggactttgaatcca

SEQ ID NO: 58398 - DNA, 20 bp, Homo sapiens
  source 1..20: mol_type = genomic DNA
atccttaggtcgctggttcg

SEQ ID NO: 58399 - DNA, 46 bp, Homo sapiens; identical to SEQ ID NO: 10036
  source 1..46: mol_type = genomic DNA

SEQ ID NO: 58400 - DNA, 19 bp, Homo sapiens
  source 1..19: mol_type = genomic DNA
gggccagtggcgcaatgga

SEQ ID NO: 58401 - DNA, 30 bp, Homo sapiens; identical to SEQ ID NO: 18787
  source 1..30: mol_type = genomic DNA

SEQ ID NO: 58402 - DNA, 30 bp, Homo sapiens; identical to SEQ ID NO: 11357
  source 1..30: mol_type = genomic DNA

SEQ ID NO: 58403 - DNA, 29 bp, Homo sapiens
  source 1..29: mol_type = genomic DNA
gttttgacaacattcaaaaaagagtacca

SEQ ID NO: 58404 - DNA, 26 bp, Homo sapiens
  source 1..26: mol_type = genomic DNA
agtcggtagagcatgagacccttaat

SEQ ID NO: 58405 - DNA, 48 bp, Homo sapiens; identical to SEQ ID NO: 11909
  source 1..48: mol_type = genomic DNA

SEQ ID NO: 58406 - DNA, 22 bp, Homo sapiens
  source 1..22: mol_type = genomic DNA
gggattagctcaaatggtagag

SEQ ID NO: 58407 - DNA, 28 bp, Homo sapiens
  source 1..28: mol_type = genomic DNA
catggtctagcggttaggattcctggtt

SEQ ID NO: 58408 - DNA, 34 bp, Homo sapiens; identical to SEQ ID NO: 21187
  source 1..34: mol_type = genomic DNA

SEQ ID NO: 58409 - DNA, 18 bp, Homo sapiens
  source 1..18: mol_type = genomic DNA
gcggttatcacgtctgct

SEQ ID NO: 58410 - DNA, 22 bp, Homo sapiens
  source 1..22: mol_type = genomic DNA
ttcgattcccggccaacgcacc

SEQ ID NO: 58411 - DNA, 16 bp, Homo sapiens
  source 1..16: mol_type = genomic DNA
ctcgcctgccacgcgg

SEQ ID NO: 58412 - DNA, 34 bp, Homo sapiens; identical to SEQ ID NO: 15079
  source 1..34: mol_type = genomic DNA

SEQ ID NO: 58413 - DNA, 46 bp, Homo sapiens; identical to SEQ ID NO: 17899
  source 1..46: mol_type = genomic DNA

SEQ ID NO: 58414 - DNA, 20 bp, Homo sapiens
  source 1..20: mol_type = genomic DNA
cacatcaccccataaacacc

SEQ ID NO: 58415 - DNA, 34 bp, Homo sapiens; identical to SEQ ID NO: 15105
  source 1..34: mol_type = genomic DNA

SEQ ID NO: 58416 - DNA, 19 bp, Homo sapiens
  source 1..19: mol_type = genomic DNA
agcatgggactcttaatct

SEQ ID NO: 58417 - DNA, 31 bp, Homo sapiens; identical to SEQ ID NO: 15196
  source 1..31: mol_type = genomic DNA

SEQ ID NO: 58418 - DNA, 23 bp, Homo sapiens
  source 1..23: mol_type = genomic DNA
atggtttttcatatcattggtcg

SEQ ID NO: 58419 - DNA, 30 bp, Homo sapiens; identical to SEQ ID NO: 18082
  source 1..30: mol_type = genomic DNA

SEQ ID NO: 58420 - DNA, 24 bp, Homo sapiens
  source 1..24: mol_type = genomic DNA
gttcgagccccacgttgggcgcca

SEQ ID NO: 58421 - DNA, 43 bp, Homo sapiens; identical to SEQ ID NO: 22551
  source 1..43: mol_type = genomic DNA

SEQ ID NO: 58422 - DNA, 39 bp, Homo sapiens; identical to SEQ ID NO: 10310
  source 1..39: mol_type = genomic DNA

SEQ ID NO: 58423 - DNA, 28 bp, Homo sapiens
  source 1..28: mol_type = genomic DNA
ggtccagggttcaagtccctgttcgggc

SEQ ID NO: 58424 - DNA, 44 bp, Homo sapiens; identical to SEQ ID NO: 22552
  source 1..44: mol_type = genomic DNA

SEQ ID NO: 58425 - DNA, 24 bp, Homo sapiens
  source 1..24: mol_type = genomic DNA
gttcgaatcccaccgctgccacca

SEQ ID NO: 58426 - DNA, 32 bp, Homo sapiens; identical to SEQ ID NO: 10725
  source 1..32: mol_type = genomic DNA

SEQ ID NO: 58427 - DNA, 35 bp, Homo sapiens; identical to SEQ ID NO: 10988
  source 1..35: mol_type = genomic DNA

SEQ ID NO: 58428 - DNA, 41 bp, Homo sapiens; identical to SEQ ID NO: 14156
  source 1..41: mol_type = genomic DNA

SEQ ID NO: 58429 - DNA, 48 bp, Homo sapiens; identical to SEQ ID NO: 24088
  source 1..48: mol_type = genomic DNA

SEQ ID NO: 58430 - DNA, 31 bp, Homo sapiens; identical to SEQ ID NO: 26658
  source 1..31: mol_type = genomic DNA

SEQ ID NO: 58431 - DNA, 19 bp, Homo sapiens
  source 1..19: mol_type = genomic DNA
gccccagtggcctaatgga

SEQ ID NO: 58432 - DNA, 29 bp, Homo sapiens
  source 1..29: mol_type = genomic DNA
atggtggttcagtggtagaattctcgcct

SEQ ID NO: 58433 - DNA, 18 bp, Homo sapiens
  source 1..18: mol_type = genomic DNA
ttgtaaaccaggggtcgc

SEQ ID NO: 58434 - DNA, 23 bp, Homo sapiens
  source 1..23: mol_type = genomic DNA
gtcggtagagcatgggactctta

SEQ ID NO: 58435 - DNA, 28 bp, Homo sapiens
  source 1..28: mol_type = genomic DNA
agtcggtagagcatgggactcttaatct

SEQ ID NO: 58436 - DNA, 42 bp, Homo sapiens; identical to SEQ ID NO: 23938
  source 1..42: mol_type = genomic DNA

SEQ ID NO: 58437 - DNA, 20 bp, Homo sapiens
  source 1..20: mol_type = genomic DNA
gaccaagagccttcaaagcc

SEQ ID NO: 58438 - DNA, 26 bp, Homo sapiens
  source 1..26: mol_type = genomic DNA
gggttcgattctcatagtcctagcca

SEQ ID NO: 58439 - DNA, 28 bp, Homo sapiens
  source 1..28: mol_type = genomic DNA
agaggcttacgaccccttatttacccca

SEQ ID NO: 58440 - DNA, 26 bp, Homo sapiens
  source 1..26: mol_type = genomic DNA
cggcccgggttcgactcccggtgtgg

SEQ ID NO: 58441 - DNA, 33 bp, Homo sapiens; identical to SEQ ID NO: 503
  source 1..33: mol_type = genomic DNA

SEQ ID NO: 58442 - DNA, 33 bp, Homo sapiens; identical to SEQ ID NO: 21970
  source 1..33: mol_type = genomic DNA

SEQ ID NO: 58443 - DNA, 39 bp, Homo sapiens; identical to SEQ ID NO: 29037
  source 1..39: mol_type = genomic DNA

SEQ ID NO: 58444 - DNA, 17 bp, Homo sapiens
  source 1..17: mol_type = genomic DNA
ccgcgtggcctaatgga

SEQ ID NO: 58445 - DNA, 17 bp, Homo sapiens
  source 1..17: mol_type = genomic DNA
aaccctgctcgctgcgc

SEQ ID NO: 58446 - DNA, 21 bp, Homo sapiens
  source 1..21: mol_type = genomic DNA
cagtcggtagagcataagact

SEQ ID NO: 58447 - DNA, 17 bp, Homo sapiens
  source 1..17: mol_type = genomic DNA
ttcgaatcccactcctg

SEQ ID NO: 58448 - DNA, 21 bp, Homo sapiens
  source 1..21: mol_type = genomic DNA
agtggttagtactctgcgttg

SEQ ID NO: 58449 - DNA, 25 bp, Homo sapiens
  source 1..25: mol_type = genomic DNA
gctcagtcggtagagcatgagactc

SEQ ID NO: 58450 - DNA, 25 bp, Homo sapiens
  source 1..25: mol_type = genomic DNA
gaaagctcacaagaactgctaactc

SEQ ID NO: 58451 - DNA, 34 bp, Homo sapiens; identical to SEQ ID NO: 19911
  source 1..34: mol_type = genomic DNA

SEQ ID NO: 58452 - DNA, 29 bp, Homo sapiens
  source 1..29: mol_type = genomic DNA
gtcggtagagcatgagactcttaatctca

SEQ ID NO: 58453 - DNA, 16 bp, Homo sapiens
  source 1..16: mol_type = genomic DNA
gacaggggttaggcct

SEQ ID NO: 58454 - DNA, 30 bp, Homo sapiens; identical to SEQ ID NO: 7417
  source 1..30: mol_type = genomic DNA

SEQ ID NO: 58455 - DNA, 27 bp, Homo sapiens
  source 1..27: mol_type = genomic DNA
agatcctgggttcgaatcccagcggtg

SEQ ID NO: 58456 - DNA, 48 bp, Homo sapiens; identical to SEQ ID NO: 14568
  source 1..48: mol_type = genomic DNA

SEQ ID NO: 58457 - DNA, 41 bp, Homo sapiens; identical to SEQ ID NO: 14844
  source 1..41: mol_type = genomic DNA

SEQ ID NO: 58458 - DNA, 29 bp, Homo sapiens
  source 1..29: mol_type = genomic DNA
gctctcaccgccgcggcccgggttcgatt

SEQ ID NO: 58459 - DNA, 22 bp, Homo sapiens
  source 1..22: mol_type = genomic DNA
ttaaatacagaccaagagcctt

SEQ ID NO: 58460 - DNA, 20 bp, Homo sapiens
  source 1..20: mol_type = genomic DNA
ggctctgtggcttagttggc

SEQ ID NO: 58461 - DNA, 29 bp, Homo sapiens
  source 1..29: mol_type = genomic DNA
gcaacctcggttcgaatccgagtcacggc

SEQ ID NO: 58462 - DNA, 16 bp, Homo sapiens
  source 1..16: mol_type = genomic DNA
ggttaggattcctggt

SEQ ID NO: 58463 - DNA, 22 bp, Homo sapiens
  source 1..22: mol_type = genomic DNA
gacaacattcaaaaaagagtac

SEQ ID NO: 58464 - DNA, 16 bp, Homo sapiens
  source 1..16: mol_type = genomic DNA
tttaatctgagggtcc

SEQ ID NO: 58465 - DNA, 23 bp, Homo sapiens
  source 1..23: mol_type = genomic DNA
ggccccatggtgtaatggttagc

SEQ ID NO: 58466 - DNA, 19 bp, Homo sapiens
  source 1..19: mol_type = genomic DNA
ttaggattcggcgctctca

SEQ ID NO: 58467 - DNA, 24 bp, Homo sapiens
  source 1..24: mol_type = genomic DNA
tcagtcggtagagcatgggactct

SEQ ID NO: 58468 - DNA, 31 bp, Homo sapiens; identical to SEQ ID NO: 10570
  source 1..31: mol_type = genomic DNA

SEQ ID NO: 58469 - DNA, 17 bp, Homo sapiens
  source 1..17: mol_type = genomic DNA
ggcctctttttaccacc

SEQ ID NO: 58470 - DNA, 24 bp, Homo sapiens
  source 1..24: mol_type = genomic DNA
gaagcattggactgtaaatctaaa

SEQ ID NO: 58471 - DNA, 27 bp, Homo sapiens
  source 1..27: mol_type = genomic DNA
tagtgtagtggttatcacgtctgcttt

SEQ ID NO: 58472 - DNA, 16 bp, Homo sapiens
  source 1..16: mol_type = genomic DNA
gcccggctagctcagt

SEQ ID NO: 58473 - DNA, 20 bp, Homo sapiens
  source 1..20: mol_type = genomic DNA
tagtggttaggattcggcgc

SEQ ID NO: 58474 - DNA, 23 bp, Homo sapiens
  source 1..23: mol_type = genomic DNA
tggtgtagtggtatcatgcaaga

SEQ ID NO: 58475 - DNA, 33 bp, Homo sapiens; identical to SEQ ID NO: 1306
  source 1..33: mol_type = genomic DNA

SEQ ID NO: 58476 - DNA, 19 bp, Homo sapiens
  source 1..19: mol_type = genomic DNA
agtcggtggagcatgggac

SEQ ID NO: 58477 - DNA, 23 bp, Homo sapiens
  source 1..23: mol_type = genomic DNA
ttaagttaaagattaagagaacc

SEQ ID NO: 58478 - DNA, 23 bp, Homo sapiens
  source 1..23: mol_type = genomic DNA
aagctcacaagaactgctaactc

SEQ ID NO: 58479 - DNA, 29 bp, Homo sapiens
  source 1..29: mol_type = genomic DNA
aaggtcctgggttcgagccccagtggaac

SEQ ID NO: 58480 - DNA, 20 bp, Homo sapiens
  source 1..20: mol_type = genomic DNA
tcgagtctcggtggaacctc

SEQ ID NO: 58481 - DNA, 42 bp, Homo sapiens; identical to SEQ ID NO: 6380
  source 1..42: mol_type = genomic DNA

SEQ ID NO: 58482 - DNA, 21 bp, Homo sapiens
  source 1..21: mol_type = genomic DNA
tggaggcgtgggttcgaatcc

SEQ ID NO: 58483 - DNA, 25 bp, Homo sapiens
  source 1..25: mol_type = genomic DNA
gggttcgattctcatagtcctagcc

SEQ ID NO: 58484 - DNA, 48 bp, Homo sapiens; identical to SEQ ID NO: 1245
  source 1..48: mol_type = genomic DNA

SEQ ID NO: 58485 - DNA, 26 bp, Homo sapiens
  source 1..26: mol_type = genomic DNA
aattgcaaattcgaagaagcagcttc

SEQ ID NO: 58486 - DNA, 32 bp, Homo sapiens; identical to SEQ ID NO: 8562
  source 1..32: mol_type = genomic DNA

SEQ ID NO: 58487 - DNA, 31 bp, Homo sapiens; identical to SEQ ID NO: 9565
  source 1..31: mol_type = genomic DNA

SEQ ID NO: 58488 - DNA, 43 bp, Homo sapiens; identical to SEQ ID NO: 28443
  source 1..43: mol_type = genomic DNA

SEQ ID NO: 58489 - DNA, 35 bp, Homo sapiens; identical to SEQ ID NO: 10673
  source 1..35: mol_type = genomic DNA

SEQ ID NO: 58490 - DNA, 24 bp, Homo sapiens
  source 1..24: mol_type = genomic DNA
gtgtagtggttatcacgttcgcct

SEQ ID NO: 58491 - DNA, 19 bp, Homo sapiens
  source 1..19: mol_type = genomic DNA
gttaactaagtgtttgtgg

SEQ ID NO: 58492 - DNA, 32 bp, Homo sapiens; identical to SEQ ID NO: 3921
  source 1..32: mol_type = genomic DNA

SEQ ID NO: 58493 - DNA, 48 bp, Homo sapiens; identical to SEQ ID NO: 5129
  source 1..48: mol_type = genomic DNA

SEQ ID NO: 58494 - DNA, 22 bp, Homo sapiens
  source 1..22: mol_type = genomic DNA
tagtggttatcacgtctgcttt

SEQ ID NO: 58495 - DNA, 20 bp, Homo sapiens
  source 1..20: mol_type = genomic DNA
gtctaggggtatgattctcg

SEQ ID NO: 58496 - DNA, 18 bp, Homo sapiens
  source 1..18: mol_type = genomic DNA
tggttatcacgtctgctt

SEQ ID NO: 58497 - DNA, 19 bp, Homo sapiens
  source 1..19: mol_type = genomic DNA
atggttagcactctggact

SEQ ID NO: 58498 - DNA, 26 bp, Homo sapiens
  source 1..26: mol_type = genomic DNA
ttgactgcagatcaagaggtccccgg

SEQ ID NO: 58499 - DNA, 48 bp, Homo sapiens; identical to SEQ ID NO: 8764
  source 1..48: mol_type = genomic DNA

SEQ ID NO: 58500 - DNA, 39 bp, Homo sapiens; identical to SEQ ID NO: 26817
  source 1..39: mol_type = genomic DNA

SEQ ID NO: 58501 - DNA, 23 bp, Homo sapiens
  source 1..23: mol_type = genomic DNA
tagtggttagtactctgcgttgt

SEQ ID NO: 58502 - DNA, 18 bp, Homo sapiens
  source 1..18: mol_type = genomic DNA
atcccactgctgccacca

SEQ ID NO: 58503 - DNA, 34 bp, Homo sapiens; identical to SEQ ID NO: 15089
  source 1..34: mol_type = genomic DNA

SEQ ID NO: 58504 - DNA, 23 bp, Homo sapiens
  source 1..23: mol_type = genomic DNA
taggattcggcgctttcaccgcc

SEQ ID NO: 58505 - DNA, 34 bp, Homo sapiens; identical to SEQ ID NO: 28918
  source 1..34: mol_type = genomic DNA

SEQ ID NO: 58506 - DNA, 29 bp, Homo sapiens
  source 1..29: mol_type = genomic DNA
cggctagctcagtcggtagagcatgagac

SEQ ID NO: 58507 - DNA, 19 bp, Homo sapiens
  source 1..19: mol_type = genomic DNA
agctgttaactaagtgttt

SEQ ID NO: 58508 - DNA, 34 bp, Homo sapiens; identical to SEQ ID NO: 14626
  source 1..34: mol_type = genomic DNA

SEQ ID NO: 58509 - DNA, 34 bp, Homo sapiens; identical to SEQ ID NO: 21799
  source 1..34: mol_type = genomic DNA

SEQ ID NO: 58510 - DNA, 44 bp, Homo sapiens; identical to SEQ ID NO: 22002
  source 1..44: mol_type = genomic DNA

SEQ ID NO: 58511 - DNA, 19 bp, Homo sapiens
  source 1..19: mol_type = genomic DNA
tctcagggatgggttcgat

SEQ ID NO: 58512 - DNA, 39 bp, Homo sapiens; identical to SEQ ID NO: 12137
  source 1..39: mol_type = genomic DNA

SEQ ID NO: 58513 - DNA, 20 bp, Homo sapiens
  source 1..20: mol_type = genomic DNA
ggtatagctcagtggtagag

SEQ ID NO: 58514 - DNA, 37 bp, Homo sapiens; identical to SEQ ID NO: 12903
  source 1..37: mol_type = genomic DNA

SEQ ID NO: 58515 - DNA, 28 bp, Homo sapiens
  source 1..28: mol_type = genomic DNA
aatggtggttcagtggtagaattctcgc

SEQ ID NO: 58516 - DNA, 17 bp, Homo sapiens
  source 1..17: mol_type = genomic DNA
gcagcgatggccgagtg

SEQ ID NO: 58517 - DNA, 31 bp, Homo sapiens; identical to SEQ ID NO: 17568
  source 1..31: mol_type = genomic DNA

SEQ ID NO: 58518 - DNA, 25 bp, Homo sapiens
  source 1..25: mol_type = genomic DNA
tggcagagcccggtaatcgcataaa

SEQ ID NO: 58519 - DNA, 29 bp, Homo sapiens
  source 1..29: mol_type = genomic DNA
ttaacacaaagcacccaacttacacttag

SEQ ID NO: 58520 - DNA, 25 bp, Homo sapiens
  source 1..25: mol_type = genomic DNA
ttagctgttaactaagtgtttgtgg

SEQ ID NO: 58521 - DNA, 28 bp, Homo sapiens
  source 1..28: mol_type = genomic DNA
gcaatggtggttcagtggtagaattctc

SEQ ID NO: 58522 - DNA, 33 bp, Homo sapiens; identical to SEQ ID NO: 8120
  source 1..33: mol_type = genomic DNA

SEQ ID NO: 58523 - DNA, 40 bp, Homo sapiens; identical to SEQ ID NO: 20621
  source 1..40: mol_type = genomic DNA

SEQ ID NO: 58524 - DNA, 33 bp, Homo sapiens; identical to SEQ ID NO: 21141
  source 1..33: mol_type = genomic DNA

SEQ ID NO: 58525 - DNA, 19 bp, Homo sapiens
  source 1..19: mol_type = genomic DNA
gaccgcgtggcctaatgga

SEQ ID NO: 58526 - DNA, 23 bp, Homo sapiens
  source 1..23: mol_type = genomic DNA
ctctggactctgaatccagcgat

SEQ ID NO: 58527 - DNA, 30 bp, Homo sapiens; identical to SEQ ID NO: 12521
  source 1..30: mol_type = genomic DNA

SEQ ID NO: 58528 - DNA, 48 bp, Homo sapiens; identical to SEQ ID NO: 848
  source 1..48: mol_type = genomic DNA

SEQ ID NO: 58529 - DNA, 48 bp, Homo sapiens; identical to SEQ ID NO: 8496
  source 1..48: mol_type = genomic DNA

SEQ ID NO: 58530 - DNA, 44 bp, Homo sapiens; identical to SEQ ID NO: 21494
  source 1..44: mol_type = genomic DNA

SEQ ID NO: 58531 - DNA, 29 bp, Homo sapiens
  source 1..29: mol_type = genomic DNA
gatgggttcgattctcatagtcctagcca

SEQ ID NO: 58532 - DNA, 23 bp, Homo sapiens
  source 1..23: mol_type = genomic DNA
acacgcgaaaggtccccggttcg

SEQ ID NO: 58533 - DNA, 48 bp, Homo sapiens; identical to SEQ ID NO: 28350
  source 1..48: mol_type = genomic DNA

SEQ ID NO: 58534 - DNA, 27 bp, Homo sapiens
  source 1..27: mol_type = genomic DNA
gaggcttacgaccccttatttacccca

SEQ ID NO: 58535 - DNA, 24 bp, Homo sapiens
  source 1..24: mol_type = genomic DNA
gctaatggtggagttaaagacttt

SEQ ID NO: 58536 - DNA, 36 bp, Homo sapiens; identical to SEQ ID NO: 20369
  source 1..36: mol_type = genomic DNA

SEQ ID NO: 58537 - DNA, 21 bp, Homo sapiens
  source 1..21: mol_type = genomic DNA
tctcagggatgggttcgattc

SEQ ID NO: 58538 - DNA, 43 bp, Homo sapiens; identical to SEQ ID NO: 8796
  source 1..43: mol_type = genomic DNA

SEQ ID NO: 58539 - DNA, 38 bp, Homo sapiens; identical to SEQ ID NO: 16162
  source 1..38: mol_type = genomic DNA

SEQ ID NO: 58540 - DNA, 20 bp, Homo sapiens
  source 1..20: mol_type = genomic DNA
caatccccggcacctccacc

SEQ ID NO: 58541 - DNA, 27 bp, Homo sapiens
  source 1..27: mol_type = genomic DNA
gctagctcagtcggtagagcatgagac

SEQ ID NO: 58542 - DNA, 22 bp, Homo sapiens
  source 1..22: mol_type = genomic DNA
gacgggctcacatcaccccata

SEQ ID NO: 58543 - DNA, 24 bp, Homo sapiens
  source 1..24: mol_type = genomic DNA
agtgtagtggtcatcacgttcgcc

SEQ ID NO: 58544 - DNA, 32 bp, Homo sapiens; identical to SEQ ID NO: 8806
  source 1..32: mol_type = genomic DNA

SEQ ID NO: 58545 - DNA, 19 bp, Homo sapiens
  source 1..19: mol_type = genomic DNA
tcgtaaaccgaagatcgcg

SEQ ID NO: 58546 - DNA, 40 bp, Homo sapiens; identical to SEQ ID NO: 29730
  source 1..40: mol_type = genomic DNA

SEQ ID NO: 58547 - DNA, 32 bp, Homo sapiens; identical to SEQ ID NO: 30037
  source 1..32: mol_type = genomic DNA

SEQ ID NO: 58548 - DNA, 17 bp, Homo sapiens
  source 1..17: mol_type = genomic DNA
aaaacttaaaactttac

SEQ ID NO: 58549 - DNA, 48 bp, Homo sapiens; identical to SEQ ID NO: 9730
  source 1..48: mol_type = genomic DNA

SEQ ID NO: 58550 - DNA, 17 bp, Homo sapiens
  source 1..17: mol_type = genomic DNA
tgatttcgactcattaa

SEQ ID NO: 58551 - DNA, 39 bp, Homo sapiens; identical to SEQ ID NO: 13177
  source 1..39: mol_type = genomic DNA

SEQ ID NO: 58552 - DNA, 22 bp, Homo sapiens
  source 1..22: mol_type = genomic DNA
gcgttggtggtatagtggtgag

SEQ ID NO: 58553 - DNA, 24 bp, Homo sapiens
  source 1..24: mol_type = genomic DNA
ggttccatagtgtagtggttatca

SEQ ID NO: 58554 - DNA, 23 bp, Homo sapiens
  source 1..23: mol_type = genomic DNA
ggttcgattccggctcgaaggac

SEQ ID NO: 58555 - DNA, 24 bp, Homo sapiens
  source 1..24: mol_type = genomic DNA
tggtctagtggctaggattcggcg

SEQ ID NO: 58556 - DNA, 20 bp, Homo sapiens
  source 1..20: mol_type = genomic DNA
ttaaagattaagagaaccaa

SEQ ID NO: 58557 - DNA, 29 bp, Homo sapiens
  source 1..29: mol_type = genomic DNA
tgtagctcagtggtagagcatttgactgc

SEQ ID NO: 58558 - DNA, 30 bp, Homo sapiens; identical to SEQ ID NO: 27986
  source 1..30: mol_type = genomic DNA

SEQ ID NO: 58559 - DNA, 18 bp, Homo sapiens
  source 1..18: mol_type = genomic DNA
gccgcgtggcctaatgga

SEQ ID NO: 58560 - DNA, 23 bp, Homo sapiens
  source 1..23: mol_type = genomic DNA
taagccagggattgtgggttcga

SEQ ID NO: 58561 - DNA, 35 bp, Homo sapiens; identical to SEQ ID NO: 16852
  source 1..35: mol_type = genomic DNA

SEQ ID NO: 58562 - DNA, 30 bp, Homo sapiens; identical to SEQ ID NO: 18355
  source 1..30: mol_type = genomic DNA

SEQ ID NO: 58563 - DNA, 26 bp, Homo sapiens
  source 1..26: mol_type = genomic DNA
cgtatagtggttagtactctgcgttg

SEQ ID NO: 58564 - DNA, 19 bp, Homo sapiens
  source 1..19: mol_type = genomic DNA
ggctctgtggcgcaatgga

SEQ ID NO: 58565 - DNA, 36 bp, Homo sapiens; identical to SEQ ID NO: 7401
  source 1..36: mol_type = genomic DNA

SEQ ID NO: 58566 - DNA, 27 bp, Homo sapiens
  source 1..27: mol_type = genomic DNA
ttcatatcattggtcgtggttgtagtc

SEQ ID NO: 58567 - DNA, 31 bp, Homo sapiens; identical to SEQ ID NO: 13047
  source 1..31: mol_type = genomic DNA

SEQ ID NO: 58568 - DNA, 18 bp, Homo sapiens
  source 1..18: mol_type = genomic DNA
gtggtatcatgcaagatt

SEQ ID NO: 58569 - DNA, 30 bp, Homo sapiens; identical to SEQ ID NO: 13916
  source 1..30: mol_type = genomic DNA

SEQ ID NO: 58570 - DNA, 31 bp, Homo sapiens; identical to SEQ ID NO: 26642
  source 1..31: mol_type = genomic DNA

SEQ ID NO: 58571 - DNA, 30 bp, Homo sapiens; identical to SEQ ID NO: 7138
  source 1..30: mol_type = genomic DNA

SEQ ID NO: 58572 - DNA, 18 bp, Homo sapiens
  source 1..18: mol_type = genomic DNA
aactgggcggaaacacca

SEQ ID NO: 58573 - DNA, 36 bp, Homo sapiens; identical to SEQ ID NO: 23843
  source 1..36: mol_type = genomic DNA

SEQ ID NO: 58574 - DNA, 22 bp, Homo sapiens
  source 1..22: mol_type = genomic DNA
tggtctagtggttaggattcgg

SEQ ID NO: 58575 - DNA, 16 bp, Homo sapiens
  source 1..16: mol_type = genomic DNA
cgcgtggcctaatgga

SEQ ID NO: 58576 - DNA, 17 bp, Homo sapiens
  source 1..17: mol_type = genomic DNA
aaccgggcggaaacacc

SEQ ID NO: 58577 - DNA, 40 bp, Homo sapiens; identical to SEQ ID NO: 21196
  source 1..40: mol_type = genomic DNA

SEQ ID NO: 58578 - DNA, 23 bp, Homo sapiens
  source 1..23: mol_type = genomic DNA
gttcgagtcccacctggggtgcc

SEQ ID NO: 58579 - DNA, 37 bp, Homo sapiens; identical to SEQ ID NO: 28255
  source 1..37: mol_type = genomic DNA

SEQ ID NO: 58580 - DNA, 20 bp, Homo sapiens
  source 1..20: mol_type = genomic DNA
aggggtagagcatttgactg

SEQ ID NO: 58581 - DNA, 22 bp, Homo sapiens
  source 1..22: mol_type = genomic DNA
ttcaagtcacgtcggggtcacc

SEQ ID NO: 58582 - DNA, 29 bp, Homo sapiens
  source 1..29: mol_type = genomic DNA
acatggtctagcggttaggattcctggtt

SEQ ID NO: 58583 - DNA, 21 bp, Homo sapiens
  source 1..21: mol_type = genomic DNA
cttaagatccaatggacatat

SEQ ID NO: 58584 - DNA, 39 bp, Homo sapiens; identical to SEQ ID NO: 20817
  source 1..39: mol_type = genomic DNA

SEQ ID NO: 58585 - DNA, 16 bp, Homo sapiens
  source 1..16: mol_type = genomic DNA
gtcgcagtctcccctg

SEQ ID NO: 58586 - DNA, 25 bp, Homo sapiens
  source 1..25: mol_type = genomic DNA
tagtaccgttaacttccaattaact

SEQ ID NO: 58587 - DNA, 19 bp, Homo sapiens
  source 1..19: mol_type = genomic DNA
gtagtgtagtggttatcac

SEQ ID NO: 58588 - DNA, 18 bp, Homo sapiens
  source 1..18: mol_type = genomic DNA
cttataatgccgaggttg

SEQ ID NO: 58589 - DNA, 30 bp, Homo sapiens; identical to SEQ ID NO: 4474
  source 1..30: mol_type = genomic DNA

SEQ ID NO: 58590 - DNA, 17 bp, Homo sapiens
  source 1..17: mol_type = genomic DNA
tcctcacacggggcacc

SEQ ID NO: 58591 - DNA, 22 bp, Homo sapiens
  source 1..22: mol_type = genomic DNA
ctgagtgaagcattggactgta

SEQ ID NO: 58592 - DNA, 16 bp, Homo sapiens
  source 1..16: mol_type = genomic DNA
tcctgctcacagcgcc

SEQ ID NO: 58593 - DNA, 32 bp, Homo sapiens; identical to SEQ ID NO: 4132
  source 1..32: mol_type = genomic DNA

SEQ ID NO: 58594 - DNA, 33 bp, Homo sapiens; identical to SEQ ID NO: 10211
  source 1..33: mol_type = genomic DNA

SEQ ID NO: 58595 - DNA, 35 bp, Homo sapiens; identical to SEQ ID NO: 26852
  source 1..35: mol_type = genomic DNA

SEQ ID NO: 58596 - DNA, 31 bp, Homo sapiens; identical to SEQ ID NO: 205
  source 1..31: mol_type = genomic DNA

SEQ ID NO: 58597 - DNA, 34 bp, Homo sapiens; identical to SEQ ID NO: 4263
  source 1..34: mol_type = genomic DNA

SEQ ID NO: 58598 - DNA, 31 bp, Homo sapiens; identical to SEQ ID NO: 9949
  source 1..31: mol_type = genomic DNA

SEQ ID NO: 58599 - DNA, 23 bp, Homo sapiens
  source 1..23: mol_type = genomic DNA
taggtcgctggttcgaatccggc

SEQ ID NO: 58600 - DNA, 32 bp, Homo sapiens; identical to SEQ ID NO: 17841
  source 1..32: mol_type = genomic DNA

SEQ ID NO: 58601 - DNA, 18 bp, Homo sapiens
  source 1..18: mol_type = genomic DNA
gcgctctcaccgccgcgg

SEQ ID NO: 58602 - DNA, 27 bp, Homo sapiens
  source 1..27: mol_type = genomic DNA
tgggttcgattctcatagtcctagcca

SEQ ID NO: 58603 - DNA, 32 bp, Homo sapiens; identical to SEQ ID NO: 15286
  source 1..32: mol_type = genomic DNA

SEQ ID NO: 58604 - DNA, 19 bp, Homo sapiens
  source 1..19: mol_type = genomic DNA
tggttagtactctgcgttg

SEQ ID NO: 58605 - DNA, 30 bp, Homo sapiens; identical to SEQ ID NO: 7068
  source 1..30: mol_type = genomic DNA

SEQ ID NO: 58606 - DNA, 18 bp, Homo sapiens
  source 1..18: mol_type = genomic DNA
caggggttagagcactgg

SEQ ID NO: 58607 - DNA, 21 bp, Homo sapiens
  source 1..21: mol_type = genomic DNA
ttcacccaggcggcccgggtt

SEQ ID NO: 58608 - DNA, 38 bp, Homo sapiens; identical to SEQ ID NO: 6718
  source 1..38: mol_type = genomic DNA

SEQ ID NO: 58609 - DNA, 18 bp, Homo sapiens
  source 1..18: mol_type = genomic DNA
agtggtagaattctcacc

SEQ ID NO: 58610 - DNA, 35 bp, Homo sapiens; identical to SEQ ID NO: 24059
  source 1..35: mol_type = genomic DNA

SEQ ID NO: 58611 - DNA, 17 bp, Homo sapiens
  source 1..17: mol_type = genomic DNA
tggttaggattcagcgc

SEQ ID NO: 58612 - DNA, 21 bp, Homo sapiens
  source 1..21: mol_type = genomic DNA
tgtagtcgtggccgagtggtt

SEQ ID NO: 58613 - DNA, 16 bp, Homo sapiens
  source 1..16: mol_type = genomic DNA
gactttttctctgacc

SEQ ID NO: 58614 - DNA, 21 bp, Homo sapiens
  source 1..21: mol_type = genomic DNA
agtaaggtcagctaaataagc

SEQ ID NO: 58615 - DNA, 26 bp, Homo sapiens
  source 1..26: mol_type = genomic DNA
ggtctagtggttaggattcggcgctc

SEQ ID NO: 58616 - DNA, 29 bp, Homo sapiens
  source 1..29: mol_type = genomic DNA
atagctcagtcggtagagcatcagacttt

SEQ ID NO: 58617 - DNA, 44 bp, Homo sapiens; identical to SEQ ID NO: 27629
  source 1..44: mol_type = genomic DNA

SEQ ID NO: 58618 - DNA, 17 bp, Homo sapiens
  source 1..17: mol_type = genomic DNA
tggttagtactctgcgt

SEQ ID NO: 58619 - DNA, 46 bp, Homo sapiens; identical to SEQ ID NO: 58
  source 1..46: mol_type = genomic DNA

SEQ ID NO: 58620 - DNA, 38 bp, Homo sapiens; identical to SEQ ID NO: 11948
  source 1..38: mol_type = genomic DNA

SEQ ID NO: 58621 - DNA, 19 bp, Homo sapiens
  source 1..19: mol_type = genomic DNA
gttcgactcccagtggggc

SEQ ID NO: 58622 - DNA, 23 bp, Homo sapiens
  source 1..23: mol_type = genomic DNA
gcgctctcaccgccgcggcccgg

SEQ ID NO: 58623 - DNA, 36 bp, Homo sapiens; identical to SEQ ID NO: 11903
  source 1..36: mol_type = genomic DNA

SEQ ID NO: 58624 - DNA, 25 bp, Homo sapiens
  source 1..25: mol_type = genomic DNA
ggttcgagtcctgccgcggtcgcca

SEQ ID NO: 58625 - DNA, 26 bp, Homo sapiens
  source 1..26: mol_type = genomic DNA
gctggtgtagtggtatcatgcaagat

SEQ ID NO: 58626 - DNA, 48 bp, Homo sapiens; identical to SEQ ID NO: 18318
  source 1..48: mol_type = genomic DNA

SEQ ID NO: 58627 - DNA, 25 bp, Homo sapiens
  source 1..25: mol_type = genomic DNA
ccccgcgcaggttcgaatcctgccg

SEQ ID NO: 58628 - DNA, 25 bp, Homo sapiens
  source 1..25: mol_type = genomic DNA
cccgaaaatgttggttatacccttc

SEQ ID NO: 58629 - DNA, 16 bp, Homo sapiens
  source 1..16: mol_type = genomic DNA
cgcccggctagctcag

SEQ ID NO: 58630 - DNA, 30 bp, Homo sapiens; identical to SEQ ID NO: 2849
  source 1..30: mol_type = genomic DNA

SEQ ID NO: 58631 - DNA, 24 bp, Homo sapiens
  source 1..24: mol_type = genomic DNA
agcagagtggcgcagcggaagcgt

SEQ ID NO: 58632 - DNA, 18 bp, Homo sapiens
  source 1..18: mol_type = genomic DNA
acgaatgatttcgactca

SEQ ID NO: 58633 - DNA, 28 bp, Homo sapiens
  source 1..28: mol_type = genomic DNA
cggatagctcagtcggtagagcatcaga

SEQ ID NO: 58634 - DNA, 17 bp, Homo sapiens
  source 1..17: mol_type = genomic DNA
cttacctcctcaaagca

SEQ ID NO: 58635 - DNA, 29 bp, Homo sapiens
  source 1..29: mol_type = genomic DNA
tcgcgggttcgaaccccgtacgggccacc

SEQ ID NO: 58636 - DNA, 46 bp, Homo sapiens; identical to SEQ ID NO: 7746
  source 1..46: mol_type = genomic DNA

SEQ ID NO: 58637 - DNA, 31 bp, Homo sapiens; identical to SEQ ID NO: 8322
  source 1..31: mol_type = genomic DNA

SEQ ID NO: 58638 - DNA, 34 bp, Homo sapiens; identical to SEQ ID NO: 8925
  source 1..34: mol_type = genomic DNA

SEQ ID NO: 58639 - DNA, 26 bp, Homo sapiens
  source 1..26: mol_type = genomic DNA
ccgggttcgattcccgggcggcgcac

SEQ ID NO: 58640 - DNA, 37 bp, Homo sapiens; identical to SEQ ID NO: 18089
  source 1..37: mol_type = genomic DNA

SEQ ID NO: 58641 - DNA, 24 bp, Homo sapiens
  source 1..24: mol_type = genomic DNA
gagaaccaacacctctttacagtg

SEQ ID NO: 58642 - DNA, 33 bp, Homo sapiens; identical to SEQ ID NO: 18693
  source 1..33: mol_type = genomic DNA

SEQ ID NO: 58643 - DNA, 22 bp, Homo sapiens
  source 1..22: mol_type = genomic DNA
gtagtgtagcggttatcacatt

SEQ ID NO: 58644 - DNA, 27 bp, Homo sapiens
  source 1..27: mol_type = genomic DNA
tgaatccagcgatccgagttcgagtct

SEQ ID NO: 58645 - DNA, 23 bp, Homo sapiens
  source 1..23: mol_type = genomic DNA
gtcacggtggccgagtggttaag

SEQ ID NO: 58646 - DNA, 23 bp, Homo sapiens
  source 1..23: mol_type = genomic DNA
attagggtgcttagctgttaact

SEQ ID NO: 58647 - DNA, 23 bp, Homo sapiens
  source 1..23: mol_type = genomic DNA
cttagcattaaccttttaagtta

SEQ ID NO: 58648 - DNA, 32 bp, Homo sapiens; identical to SEQ ID NO: 21140
  source 1..32: mol_type = genomic DNA

SEQ ID NO: 58649 - DNA, 26 bp, Homo sapiens
  source 1..26: mol_type = genomic DNA
aggcttacgaccccttatttacccca

SEQ ID NO: 58650 - DNA, 19 bp, Homo sapiens
  source 1..19: mol_type = genomic DNA
ttcaaacctgccggggctt

SEQ ID NO: 58651 - DNA, 35 bp, Homo sapiens; identical to SEQ ID NO: 16837
  source 1..35: mol_type = genomic DNA

SEQ ID NO: 58652 - DNA, 18 bp, Homo sapiens
  source 1..18: mol_type = genomic DNA
caatacttaatttctgcc

SEQ ID NO: 58653 - DNA, 19 bp, Homo sapiens
  source 1..19: mol_type = genomic DNA
cgtggccgagtggttaagg

SEQ ID NO: 58654 - DNA, 30 bp, Homo sapiens; identical to SEQ ID NO: 26623
  source 1..30: mol_type = genomic DNA

SEQ ID NO: 58655 - DNA, 40 bp, Homo sapiens; identical to SEQ ID NO: 26752
  source 1..40: mol_type = genomic DNA

SEQ ID NO: 58656 - DNA, 40 bp, Homo sapiens; identical to SEQ ID NO: 26823
  source 1..40: mol_type = genomic DNA

SEQ ID NO: 58657 - DNA, 23 bp, Homo sapiens
  source 1..23: mol_type = genomic DNA
gtgaagcattggactgtaaatct

SEQ ID NO: 58658 - DNA, 19 bp, Homo sapiens
  source 1..19: mol_type = genomic DNA
caaatctcggtggaacctc

SEQ ID NO: 58659 - DNA, 27 bp, Homo sapiens
  source 1..27: mol_type = genomic DNA
cgttggtggtatagtggttagcatagc

SEQ ID NO: 58660 - DNA, 18 bp, Homo sapiens
  source 1..18: mol_type = genomic DNA
atggaggccatggggttg

SEQ ID NO: 58661 - DNA, 23 bp, Homo sapiens
  source 1..23: mol_type = genomic DNA
agactcaagttctggtctccgga

SEQ ID NO: 58662 - DNA, 25 bp, Homo sapiens
  source 1..25: mol_type = genomic DNA
agaagcagcttcaaacctgccgggg

SEQ ID NO: 58663 - DNA, 27 bp, Homo sapiens
  source 1..27: mol_type = genomic DNA
agtaagttgcaatacttaatttctgcc

SEQ ID NO: 58664 - DNA, 34 bp, Homo sapiens; identical to SEQ ID NO: 25596
  source 1..34: mol_type = genomic DNA

SEQ ID NO: 58665 - DNA, 24 bp, Homo sapiens
  source 1..24: mol_type = genomic DNA
gttcaattccccgacggggagcca

SEQ ID NO: 58666 - DNA, 22 bp, Homo sapiens
  source 1..22: mol_type = genomic DNA
tcaattctcgctggggcctcca

SEQ ID NO: 58667 - DNA, 19 bp, Homo sapiens
  source 1..19: mol_type = genomic DNA
agaaatatgtctgataaaa

SEQ ID NO: 58668 - DNA, 20 bp, Homo sapiens
  source 1..20: mol_type = genomic DNA
aggtcctgggttcgagcccc

SEQ ID NO: 58669 - DNA, 19 bp, Homo sapiens
  source 1..19: mol_type = genomic DNA
tctaaaggtccctggttcg

SEQ ID NO: 58670 - DNA, 25 bp, Homo sapiens
  source 1..25: mol_type = genomic DNA
gcagcttcaaacctgccggggcttc

SEQ ID NO: 58671 - DNA, 18 bp, Homo sapiens
  source 1..18: mol_type = genomic DNA
attaactagttttgacaa

SEQ ID NO: 58672 - DNA, 30 bp, Homo sapiens; identical to SEQ ID NO: 15773
  source 1..30: mol_type = genomic DNA

SEQ ID NO: 58673 - DNA, 36 bp, Homo sapiens; identical to SEQ ID NO: 4154
  source 1..36: mol_type = genomic DNA

SEQ ID NO: 58674 - DNA, 19 bp, Homo sapiens
  source 1..19: mol_type = genomic DNA
cagaccaagagccttcaaa

SEQ ID NO: 58675 - DNA, 45 bp, Homo sapiens; identical to SEQ ID NO: 9933
  source 1..45: mol_type = genomic DNA

SEQ ID NO: 58676 - DNA, 17 bp, Homo sapiens
  source 1..17: mol_type = genomic DNA
ttgcgttcagttgatgc

SEQ ID NO: 58677 - DNA, 16 bp, Homo sapiens
  source 1..16: mol_type = genomic DNA
cagcgatccgagttcg

SEQ ID NO: 58678 - DNA, 40 bp, Homo sapiens; identical to SEQ ID NO: 538
  source 1..40: mol_type = genomic DNA

SEQ ID NO: 58679 - DNA, 35 bp, Homo sapiens; identical to SEQ ID NO: 8027
  source 1..35: mol_type = genomic DNA

SEQ ID NO: 58680 - DNA, 37 bp, Homo sapiens; identical to SEQ ID NO: 10835
  source 1..37: mol_type = genomic DNA

SEQ ID NO: 58681 - DNA, 31 bp, Homo sapiens; identical to SEQ ID NO: 12247
  source 1..31: mol_type = genomic DNA

SEQ ID NO: 58682 - DNA, 27 bp, Homo sapiens
  source 1..27: mol_type = genomic DNA
gcagcttcaaacctgccggggcttcca

SEQ ID NO: 58683 - DNA, 41 bp, Homo sapiens; identical to SEQ ID NO: 19129
  source 1..41: mol_type = genomic DNA

SEQ ID NO: 58684 - DNA, 32 bp, Homo sapiens; identical to SEQ ID NO: 25184
  source 1..32: mol_type = genomic DNA

SEQ ID NO: 58685 - DNA, 30 bp, Homo sapiens; identical to SEQ ID NO: 19439
  source 1..30: mol_type = genomic DNA

SEQ ID NO: 58686 - DNA, 29 bp, Homo sapiens
  source 1..29: mol_type = genomic DNA
cagaggcttacgaccccttatttacccca

SEQ ID NO: 58687 - DNA, 23 bp, Homo sapiens
  source 1..23: mol_type = genomic DNA
tcagtcggtagagcatgagactc

SEQ ID NO: 58688 - DNA, 17 bp, Homo sapiens
  source 1..17: mol_type = genomic DNA
acgaatgatttcgactc

SEQ ID NO: 58689 - DNA, 16 bp, Homo sapiens
  source 1..16: mol_type = genomic DNA
tccgtggcgcaatgga

SEQ ID NO: 58690 - DNA, 18 bp, Homo sapiens
  source 1..18: mol_type = genomic DNA
aaaaaccatttcataact

SEQ ID NO: 58691 - DNA, 20 bp, Homo sapiens
  source 1..20: mol_type = genomic DNA
gagcatgggactcttaatcc

SEQ ID NO: 58692 - DNA, 47 bp, Homo sapiens; identical to SEQ ID NO: 19346
  source 1..47: mol_type = genomic DNA

SEQ ID NO: 58693 - DNA, 20 bp, Homo sapiens
  source 1..20: mol_type = genomic DNA
atggttagcactctggactc

SEQ ID NO: 58694 - DNA, 19 bp, Homo sapiens
  source 1..19: mol_type = genomic DNA
gccccggtggcctaatgga

SEQ ID NO: 58695 - DNA, 22 bp, Homo sapiens
  source 1..22: mol_type = genomic DNA
gtttgtgggtttaagtcccatt

SEQ ID NO: 58696 - DNA, 18 bp, Homo sapiens
  source 1..18: mol_type = genomic DNA
tacccttcccgtactacc

SEQ ID NO: 58697 - DNA, 18 bp, Homo sapiens
  source 1..18: mol_type = genomic DNA
tcaaacctgccggggctt

SEQ ID NO: 58698 - DNA, 18 bp, Homo sapiens
  source 1..18: mol_type = genomic DNA
tttgcgttcagttgatgc

SEQ ID NO: 58699 - DNA, 26 bp, Homo sapiens
  source 1..26: mol_type = genomic DNA
cgcgggagaccggggttcaattcccc

SEQ ID NO: 58700 - DNA, 25 bp, Homo sapiens
  source 1..25: mol_type = genomic DNA
gagatgaaaacctttttccaaggac

SEQ ID NO: 58701 - DNA, 33 bp, Homo sapiens; identical to SEQ ID NO: 26525
  source 1..33: mol_type = genomic DNA

SEQ ID NO: 58702 - DNA, 29 bp, Homo sapiens
  source 1..29: mol_type = genomic DNA
ggtggtctagtggttaggattcggcgctc

SEQ ID NO: 58703 - DNA, 34 bp, Homo sapiens; identical to SEQ ID NO: 19935
  source 1..34: mol_type = genomic DNA

SEQ ID NO: 58704 - DNA, 27 bp, Homo sapiens
  source 1..27: mol_type = genomic DNA
agtcggtagagcatcagacttttaatc

SEQ ID NO: 58705 - DNA, 23 bp, Homo sapiens
  source 1..23: mol_type = genomic DNA
tggttcgattccggctcgaagga

SEQ ID NO: 58706 - DNA, 47 bp, Homo sapiens; identical to SEQ ID NO: 1244
  source 1..47: mol_type = genomic DNA

SEQ ID NO: 58707 - DNA, 32 bp, Homo sapiens; identical to SEQ ID NO: 16988
  source 1..32: mol_type = genomic DNA

SEQ ID NO: 58708 - DNA, 43 bp, Homo sapiens; identical to SEQ ID NO: 1550
  source 1..43: mol_type = genomic DNA

SEQ ID NO: 58709 - DNA, 16 bp, Homo sapiens
  source 1..16: mol_type = genomic DNA
gatccttaggtcgctg

SEQ ID NO: 58710 - DNA, 46 bp, Homo sapiens; identical to SEQ ID NO: 22941
  source 1..46: mol_type = genomic DNA

SEQ ID NO: 58711 - DNA, 32 bp, Homo sapiens; identical to SEQ ID NO: 24640
  source 1..32: mol_type = genomic DNA

SEQ ID NO: 58712 - DNA, 20 bp, Homo sapiens
  source 1..20: mol_type = genomic DNA
tggttagtactctgcgttgt

SEQ ID NO: 58713 - DNA, 29 bp, Homo sapiens
  source 1..29: mol_type = genomic DNA
gtcgtggttgtagtccgtgcgagaatacc

SEQ ID NO: 58714 - DNA, 19 bp, Homo sapiens
  source 1..19: mol_type = genomic DNA
atccccagtacctccacca

SEQ ID NO: 58715 - DNA, 28 bp, Homo sapiens
  source 1..28: mol_type = genomic DNA
tagctcagtcggtagagcatcagacttt

SEQ ID NO: 58716 - DNA, 43 bp, Homo sapiens; identical to SEQ ID NO: 16572
  source 1..43: mol_type = genomic DNA

SEQ ID NO: 58717 - DNA, 16 bp, Homo sapiens
  source 1..16: mol_type = genomic DNA
agcttcaaacctgccg

SEQ ID NO: 58718 - DNA, 29 bp, Homo sapiens
  source 1..29: mol_type = genomic DNA
attctcgcctgccacgcgggaggcccggg

SEQ ID NO: 58719 - DNA, 30 bp, Homo sapiens; identical to SEQ ID NO: 8406
  source 1..30: mol_type = genomic DNA

SEQ ID NO: 58720 - DNA, 31 bp, Homo sapiens; identical to SEQ ID NO: 10276
  source 1..31: mol_type = genomic DNA

SEQ ID NO: 58721 - DNA, 39 bp, Homo sapiens; identical to SEQ ID NO: 14373
  source 1..39: mol_type = genomic DNA

SEQ ID NO: 58722 - DNA, 25 bp, Homo sapiens
  source 1..25: mol_type = genomic DNA
ttagaatcttagctttgggtgctaa

SEQ ID NO: 58723 - DNA, 24 bp, Homo sapiens
  source 1..24: mol_type = genomic DNA
gttcgattctcatagtcctagcca

SEQ ID NO: 58724 - DNA, 17 bp, Homo sapiens
  source 1..17: mol_type = genomic DNA
ggttccatagtgtagtg

SEQ ID NO: 58725 - DNA, 26 bp, Homo sapiens
  source 1..26: mol_type = genomic DNA
atcgtatagtggttagtactctgcgt

SEQ ID NO: 58726 - DNA, 28 bp, Homo sapiens
  source 1..28: mol_type = genomic DNA
acttaggagatttcaacttaacttgacc

SEQ ID NO: 58727 - DNA, 33 bp, Homo sapiens; identical to SEQ ID NO: 2707
  source 1..33: mol_type = genomic DNA

SEQ ID NO: 58728 - DNA, 32 bp, Homo sapiens; identical to SEQ ID NO: 17616
  source 1..32: mol_type = genomic DNA

SEQ ID NO: 58729 - DNA, 23 bp, Homo sapiens
  source 1..23: mol_type = genomic DNA
caacttaacttgaccgctctgac

SEQ ID NO: 58730 - DNA, 17 bp, Homo sapiens
  source 1..17: mol_type = genomic DNA
actgggcggaaacacca

SEQ ID NO: 58731 - DNA, 17 bp, Homo sapiens
  source 1..17: mol_type = genomic DNA
aactgggcggaaacacc

SEQ ID NO: 58732 - DNA, 31 bp, Homo sapiens; identical to SEQ ID NO: 3523
  source 1..31: mol_type = genomic DNA

SEQ ID NO: 58733 - DNA, 27 bp, Homo sapiens
  source 1..27: mol_type = genomic DNA
gaaagctcacaagaactgctaactcat

SEQ ID NO: 58734 - DNA, 31 bp, Homo sapiens; identical to SEQ ID NO: 15486
  source 1..31: mol_type = genomic DNA

SEQ ID NO: 58735 - DNA, 28 bp, Homo sapiens
  source 1..28: mol_type = genomic DNA
ggttaggattcggcgctctcaccgccgc

SEQ ID NO: 58736 - DNA, 25 bp, Homo sapiens
  source 1..25: mol_type = genomic DNA
tggtggagttaaagactttttctct

SEQ ID NO: 58737 - DNA, 48 bp, Homo sapiens; identical to SEQ ID NO: 28863
  source 1..48: mol_type = genomic DNA

SEQ ID NO: 58738 - DNA, 21 bp, Homo sapiens
  source 1..21: mol_type = genomic DNA
tgagtgaagcattggactgta

SEQ ID NO: 58739 - DNA, 24 bp, Homo sapiens
  source 1..24: mol_type = genomic DNA
ggctcacatcaccccataaacacc

SEQ ID NO: 58740 - DNA, 23 bp, Homo sapiens
  source 1..23: mol_type = genomic DNA
gtaatggtgagcactctggactc

SEQ ID NO: 58741 - DNA, 27 bp, Homo sapiens
  source 1..27: mol_type = genomic DNA
agaaccaacacctctttacagtgacca

SEQ ID NO: 58742 - DNA, 23 bp, Homo sapiens
  source 1..23: mol_type = genomic DNA
gctcagtcggtagagcatgagac

SEQ ID NO: 58743 - DNA, 18 bp, Homo sapiens
  source 1..18: mol_type = genomic DNA
gtggttatcacgtctgct

SEQ ID NO: 58744 - DNA, 27 bp, Homo sapiens
  source 1..27: mol_type = genomic DNA
aaagctcacaagaactgctaactcatg

SEQ ID NO: 58745 - DNA, 18 bp, Homo sapiens
  source 1..18: mol_type = genomic DNA
gttcgattcccggccaat

SEQ ID NO: 58746 - DNA, 16 bp, Homo sapiens
  source 1..16: mol_type = genomic DNA
gttaggattcctggtt

SEQ ID NO: 58747 - DNA, 33 bp, Homo sapiens; identical to SEQ ID NO: 11073
  source 1..33: mol_type = genomic DNA

SEQ ID NO: 58748 - DNA, 28 bp, Homo sapiens
  source 1..28: mol_type = genomic DNA
cgcgggaggcccgggttcgattcccggc

SEQ ID NO: 58749 - DNA, 32 bp, Homo sapiens; identical to SEQ ID NO: 14910
  source 1..32: mol_type = genomic DNA

SEQ ID NO: 58750 - DNA, 36 bp, Homo sapiens; identical to SEQ ID NO: 16666
  source 1..36: mol_type = genomic DNA

SEQ ID NO: 58751 - DNA, 27 bp, Homo sapiens
  source 1..27: mol_type = genomic DNA
tagctcagtcggtagagcatgagactc

SEQ ID NO: 58752 - DNA, 33 bp, Homo sapiens; identical to SEQ ID NO: 28539
  source 1..33: mol_type = genomic DNA

SEQ ID NO: 58753 - DNA, 37 bp, Homo sapiens; identical to SEQ ID NO: 28995
  source 1..37: mol_type = genomic DNA

SEQ ID NO: 58754 - DNA, 16 bp, Homo sapiens
  source 1..16: mol_type = genomic DNA
ttaatctcagggtcgt

SEQ ID NO: 58755 - DNA, 21 bp, Homo sapiens
  source 1..21: mol_type = genomic DNA
catgggtggttcagtggtaga

SEQ ID NO: 58756 - DNA, 35 bp, Homo sapiens; identical to SEQ ID NO: 23713
  source 1..35: mol_type = genomic DNA

SEQ ID NO: 58757 - DNA, 18 bp, Homo sapiens
  source 1..18: mol_type = genomic DNA
catttcgatggcgtgggt

SEQ ID NO: 58758 - DNA, 35 bp, Homo sapiens; identical to SEQ ID NO: 14588
  source 1..35: mol_type = genomic DNA

SEQ ID NO: 58759 - DNA, 31 bp, Homo sapiens; identical to SEQ ID NO: 131
  source 1..31: mol_type = genomic DNA

SEQ ID NO: 58760 - DNA, 16 bp, Homo sapiens
  source 1..16: mol_type = genomic DNA
agaaagctcacaagaa

SEQ ID NO: 58761 - DNA, 48 bp, Homo sapiens; identical to SEQ ID NO: 10037
  source 1..48: mol_type = genomic DNA

SEQ ID NO: 58762 - DNA, 16 bp, Homo sapiens
  source 1..16: mol_type = genomic DNA
gggagaccggggttcg

SEQ ID NO: 58763 - DNA, 44 bp, Homo sapiens; identical to SEQ ID NO: 28044
  source 1..44: mol_type = genomic DNA

SEQ ID NO: 58764 - DNA, 21 bp, Homo sapiens
  source 1..21: mol_type = genomic DNA
tcagtcggtagagcatcagac

SEQ ID NO: 58765 - DNA, 28 bp, Homo sapiens
  source 1..28: mol_type = genomic DNA
cgtggttgtagtccgtgcgagaatacca

SEQ ID NO: 58766 - DNA, 26 bp, Homo sapiens
  source 1..26: mol_type = genomic DNA
caggggttaggcctctttttaccacc

SEQ ID NO: 58767 - DNA, 32 bp, Homo sapiens; identical to SEQ ID NO: 19363
  source 1..32: mol_type = genomic DNA

SEQ ID NO: 58768 - DNA, 38 bp, Homo sapiens; identical to SEQ ID NO: 3082
  source 1..38: mol_type = genomic DNA

SEQ ID NO: 58769 - DNA, 24 bp, Homo sapiens
  source 1..24: mol_type = genomic DNA
tgtagcggttatcacattcgcctc

SEQ ID NO: 58770 - DNA, 18 bp, Homo sapiens
  source 1..18: mol_type = genomic DNA
aaccgggcggaaacacca

SEQ ID NO: 58771 - DNA, 27 bp, Homo sapiens
  source 1..27: mol_type = genomic DNA
atcagaagattctaggttcgactcctg

SEQ ID NO: 58772 - DNA, 16 bp, Homo sapiens
  source 1..16: mol_type = genomic DNA
cagagcatttgactgc

SEQ ID NO: 58773 - DNA, 37 bp, Homo sapiens; identical to SEQ ID NO: 20619
  source 1..37: mol_type = genomic DNA

SEQ ID NO: 58774 - DNA, 34 bp, Homo sapiens; identical to SEQ ID NO: 28007
  source 1..34: mol_type = genomic DNA

SEQ ID NO: 58775 - DNA, 23 bp, Homo sapiens
  source 1..23: mol_type = genomic DNA
gttgtagtccgtgcgagaatacc

SEQ ID NO: 58776 - DNA, 21 bp, Homo sapiens
  source 1..21: mol_type = genomic DNA
gctcacaagaactgctaactc

SEQ ID NO: 58777 - DNA, 20 bp, Homo sapiens
  source 1..20: mol_type = genomic DNA
aacaacatggctttctcacc

SEQ ID NO: 58778 - DNA, 33 bp, Homo sapiens; identical to SEQ ID NO: 24042
  source 1..33: mol_type = genomic DNA

SEQ ID NO: 58779 - DNA, 36 bp, Homo sapiens; identical to SEQ ID NO: 26853
  source 1..36: mol_type = genomic DNA

SEQ ID NO: 58780 - DNA, 34 bp, Homo sapiens; identical to SEQ ID NO: 6212
  source 1..34: mol_type = genomic DNA

SEQ ID NO: 58781 - DNA, 16 bp, Homo sapiens
  source 1..16: mol_type = genomic DNA
tccttaggtcgctggt

SEQ ID NO: 58782 - DNA, 47 bp, Homo sapiens; identical to SEQ ID NO: 8800
  source 1..47: mol_type = genomic DNA

SEQ ID NO: 58783 - DNA, 16 bp, Homo sapiens
  source 1..16: mol_type = genomic DNA
tgtccgcgtgggttcg

SEQ ID NO: 58784 - DNA, 23 bp, Homo sapiens
  source 1..23: mol_type = genomic DNA
tgtagtggttatcacgtctgctt

SEQ ID NO: 58785 - DNA, 48 bp, Homo sapiens; identical to SEQ ID NO: 1555
  source 1..48: mol_type = genomic DNA

SEQ ID NO: 58786 - DNA, 37 bp, Homo sapiens; identical to SEQ ID NO: 6717
  source 1..37: mol_type = genomic DNA

SEQ ID NO: 58787 - DNA, 19 bp, Homo sapiens
  source 1..19: mol_type = genomic DNA
atgcccccatgtctaacaa

SEQ ID NO: 58788 - DNA, 31 bp, Homo sapiens; identical to SEQ ID NO: 7037
  source 1..31: mol_type = genomic DNA

SEQ ID NO: 58789 - DNA, 33 bp, Homo sapiens; identical to SEQ ID NO: 9964
  source 1..33: mol_type = genomic DNA

SEQ ID NO: 58790 - DNA, 20 bp, Homo sapiens
  source 1..20: mol_type = genomic DNA
tagtggttagtactctgcgt

SEQ ID NO: 58791 - DNA, 30 bp, Homo sapiens; identical to SEQ ID NO: 17317
  source 1..30: mol_type = genomic DNA

SEQ ID NO: 58792 - DNA, 30 bp, Homo sapiens; identical to SEQ ID NO: 24949
  source 1..30: mol_type = genomic DNA

SEQ ID NO: 58793 - DNA, 20 bp, Homo sapiens
  source 1..20: mol_type = genomic DNA
tgtttagacgggctcacatc

SEQ ID NO: 58794 - DNA, 33 bp, Homo sapiens; identical to SEQ ID NO: 16633
  source 1..33: mol_type = genomic DNA

SEQ ID NO: 58795 - DNA, 16 bp, Homo sapiens
  source 1..16: mol_type = genomic DNA
ccagtggcgcaatgga

SEQ ID NO: 58796 - DNA, 26 bp, Homo sapiens
  source 1..26: mol_type = genomic DNA
agctcagtcggtagagcatgagactc

SEQ ID NO: 58797 - DNA, 18 bp, Homo sapiens
  source 1..18: mol_type = genomic DNA
atcagattgtgaatctga

SEQ ID NO: 58798 - DNA, 29 bp, Homo sapiens
  source 1..29: mol_type = genomic DNA
gctagctcagtcggtagagcatgagactc

SEQ ID NO: 58799 - DNA, 35 bp, Homo sapiens; identical to SEQ ID NO: 6213
  source 1..35: mol_type = genomic DNA

SEQ ID NO: 58800 - DNA, 37 bp, Homo sapiens; identical to SEQ ID NO: 10600
  source 1..37: mol_type = genomic DNA

SEQ ID NO: 58801 - DNA, 40 bp, Homo sapiens; identical to SEQ ID NO: 1023
  source 1..40: mol_type = genomic DNA

SEQ ID NO: 58802 - DNA, 19 bp, Homo sapiens
  source 1..19: mol_type = genomic DNA
agtggttaaggcgttggac

SEQ ID NO: 58803 - DNA, 45 bp, Homo sapiens; identical to SEQ ID NO: 15427
  source 1..45: mol_type = genomic DNA

SEQ ID NO: 58804 - DNA, 42 bp, Homo sapiens; identical to SEQ ID NO: 29008
  source 1..42: mol_type = genomic DNA

SEQ ID NO: 58805 - DNA, 19 bp, Homo sapiens
  source 1..19: mol_type = genomic DNA
ggctccgtggcgcaatgga

SEQ ID NO: 58806 - DNA, 28 bp, Homo sapiens
  source 1..28: mol_type = genomic DNA
gtgatcgtatagtggttagtactctgcg

SEQ ID NO: 58807 - DNA, 24 bp, Homo sapiens
  source 1..24: mol_type = genomic DNA
gggttaggcctctttttaccacca

SEQ ID NO: 58808 - DNA, 26 bp, Homo sapiens
  source 1..26: mol_type = genomic DNA
gatgaaaacctttttccaaggacacc

SEQ ID NO: 58809 - DNA, 34 bp, Homo sapiens; identical to SEQ ID NO: 16851
  source 1..34: mol_type = genomic DNA

SEQ ID NO: 58810 - DNA, 17 bp, Homo sapiens
  source 1..17: mol_type = genomic DNA
ttcctcttcttaacacc

SEQ ID NO: 58811 - DNA, 18 bp, Homo sapiens
  source 1..18: mol_type = genomic DNA
tcaaagcaatacactgaa

SEQ ID NO: 58812 - DNA, 28 bp, Homo sapiens
  source 1..28: mol_type = genomic DNA
gaaagctcacaagaactgctaactcatg

SEQ ID NO: 58813 - DNA, 19 bp, Homo sapiens
  source 1..19: mol_type = genomic DNA
taaaccgaagatcgcgggt

SEQ ID NO: 58814 - DNA, 44 bp, Homo sapiens; identical to SEQ ID NO: 19944
  source 1..44: mol_type = genomic DNA

SEQ ID NO: 58815 - DNA, 19 bp, Homo sapiens
  source 1..19: mol_type = genomic DNA
ggtcccatggtgtaatggt

SEQ ID NO: 58816 - DNA, 39 bp, Homo sapiens; identical to SEQ ID NO: 10651
  source 1..39: mol_type = genomic DNA

SEQ ID NO: 58817 - DNA, 34 bp, Homo sapiens; identical to SEQ ID NO: 29264
  source 1..34: mol_type = genomic DNA

SEQ ID NO: 58818 - DNA, 26 bp, Homo sapiens
  source 1..26: mol_type = genomic DNA
atagctcagtggtagagcatttgact

SEQ ID NO: 58819 - DNA, 23 bp, Homo sapiens
  source 1..23: mol_type = genomic DNA
gttagcactctggactttgaatc

SEQ ID NO: 58820 - DNA, 29 bp, Homo sapiens
  source 1..29: mol_type = genomic DNA
tctggactctgaatccagcgatccgagtt

SEQ ID NO: 58821 - DNA, 24 bp, Homo sapiens
  source 1..24: mol_type = genomic DNA
gttcgaatcctgccgactacgcca

SEQ ID NO: 58822 - DNA, 25 bp, Homo sapiens
  source 1..25: mol_type = genomic DNA
tagctcagtcggtagagcatcagac

SEQ ID NO: 58823 - DNA, 26 bp, Homo sapiens
  source 1..26: mol_type = genomic DNA
atagctcagtcggtagagcatcagac

SEQ ID NO: 58824 - DNA, 32 bp, Homo sapiens; identical to SEQ ID NO: 9804
  source 1..32: mol_type = genomic DNA

SEQ ID NO: 58825 - DNA, 23 bp, Homo sapiens
  source 1..23: mol_type = genomic DNA
acccaacttacacttaggagatt

SEQ ID NO: 58826 - DNA, 45 bp, Homo sapiens; identical to SEQ ID NO: 14160
  source 1..45: mol_type = genomic DNA

SEQ ID NO: 58827 - DNA, 37 bp, Homo sapiens; identical to SEQ ID NO: 16382
  source 1..37: mol_type = genomic DNA

SEQ ID NO: 58828 - DNA, 41 bp, Homo sapiens; identical to SEQ ID NO: 21061
  source 1..41: mol_type = genomic DNA

SEQ ID NO: 58829 - DNA, 40 bp, Homo sapiens; identical to SEQ ID NO: 22230
  source 1..40: mol_type = genomic DNA

SEQ ID NO: 58830 - DNA, 33 bp, Homo sapiens; identical to SEQ ID NO: 23198
  source 1..33: mol_type = genomic DNA

SEQ ID NO: 58831 - DNA, 48 bp, Homo sapiens; identical to SEQ ID NO: 30047
  source 1..48: mol_type = genomic DNA

SEQ ID NO: 58832 - DNA, 20 bp, Homo sapiens
  source 1..20: mol_type = genomic DNA
cagtcggtagagcatcagac

SEQ ID NO: 58833 - DNA, 23 bp, Homo sapiens
  source 1..23: mol_type = genomic DNA
ctagtggttaggattcggcgctc

SEQ ID NO: 58834 - DNA, 17 bp, Homo sapiens
  source 1..17: mol_type = genomic DNA
cattcttgcgacccggg

SEQ ID NO: 58835 - DNA, 20 bp, Homo sapiens
  source 1..20: mol_type = genomic DNA
cacaagaactgctaactcat

SEQ ID NO: 58836 - DNA, 35 bp, Homo sapiens; identical to SEQ ID NO: 10909
  source 1..35: mol_type = genomic DNA

SEQ ID NO: 58837 - DNA, 32 bp, Homo sapiens; identical to SEQ ID NO: 17360
  source 1..32: mol_type = genomic DNA

SEQ ID NO: 58838 - DNA, 25 bp, Homo sapiens
  source 1..25: mol_type = genomic DNA
agattgtgaatctgacaacagaggc

SEQ ID NO: 58839 - DNA, 37 bp, Homo sapiens; identical to SEQ ID NO: 19718
  source 1..37: mol_type = genomic DNA

SEQ ID NO: 58840 - DNA, 47 bp, Homo sapiens; identical to SEQ ID NO: 19947
  source 1..47: mol_type = genomic DNA

SEQ ID NO: 58841 - DNA, 21 bp, Homo sapiens
  source 1..21: mol_type = genomic DNA
tagctgttaactaagtgtttg

SEQ ID NO: 58842 - DNA, 26 bp, Homo sapiens
  source 1..26: mol_type = genomic DNA
agaaagctcacaagaactgctaactc

SEQ ID NO: 58843 - DNA, 29 bp, Homo sapiens
  source 1..29: mol_type = genomic DNA
atccattggtcttaggccccaaaaatttt

SEQ ID NO: 58844 - DNA, 39 bp, Homo sapiens; identical to SEQ ID NO: 7909
  source 1..39: mol_type = genomic DNA

SEQ ID NO: 58845 - DNA, 48 bp, Homo sapiens; identical to SEQ ID NO: 13480
  source 1..48: mol_type = genomic DNA

SEQ ID NO: 58846 - DNA, 18 bp, Homo sapiens
  source 1..18: mol_type = genomic DNA
ggggttcgattccttcct

SEQ ID NO: 58847 - DNA, 36 bp, Homo sapiens; identical to SEQ ID NO: 19222
  source 1..36: mol_type = genomic DNA

SEQ ID NO: 58848 - DNA, 33 bp, Homo sapiens; identical to SEQ ID NO: 28596
  source 1..33: mol_type = genomic DNA

SEQ ID NO: 58849 - DNA, 18 bp, Homo sapiens
  source 1..18: mol_type = genomic DNA
aagactttttctctgacc

SEQ ID NO: 58850 - DNA, 36 bp, Homo sapiens; identical to SEQ ID NO: 14589
  source 1..36: mol_type = genomic DNA

SEQ ID NO: 58851 - DNA, 36 bp, Homo sapiens; identical to SEQ ID NO: 30350
  source 1..36: mol_type = genomic DNA

SEQ ID NO: 58852 - DNA, 24 bp, Homo sapiens
  source 1..24: mol_type = genomic DNA
agctcagtcggtagagcatgagac

SEQ ID NO: 58853 - DNA, 18 bp, Homo sapiens
  source 1..18: mol_type = genomic DNA
tggttcagtggtagaatt

SEQ ID NO: 58854 - DNA, 24 bp, Homo sapiens
  source 1..24: mol_type = genomic DNA
ctcttaatctcagggtcgtgggtt

SEQ ID NO: 58855 - DNA, 24 bp, Homo sapiens
  source 1..24: mol_type = genomic DNA
ggagcttaaacccccttatttcta

SEQ ID NO: 58856 - DNA, 18 bp, Homo sapiens
  source 1..18: mol_type = genomic DNA
agatttcaacttaacttg

SEQ ID NO: 58857 - DNA, 17 bp, Homo sapiens
  source 1..17: mol_type = genomic DNA
atccgagtcacggcacc

SEQ ID NO: 58858 - DNA, 31 bp, Homo sapiens; identical to SEQ ID NO: 4233
  source 1..31: mol_type = genomic DNA

SEQ ID NO: 58859 - DNA, 27 bp, Homo sapiens
  source 1..27: mol_type = genomic DNA
caggtggcccgggttcgactcccggta

SEQ ID NO: 58860 - DNA, 32 bp, Homo sapiens; identical to SEQ ID NO: 10267
  source 1..32: mol_type = genomic DNA

SEQ ID NO: 58861 - DNA, 19 bp, Homo sapiens
  source 1..19: mol_type = genomic DNA
cgattcccggccaacgcac

SEQ ID NO: 58862 - DNA, 37 bp, Homo sapiens; identical to SEQ ID NO: 20913
  source 1..37: mol_type = genomic DNA

SEQ ID NO: 58863 - DNA, 35 bp, Homo sapiens; identical to SEQ ID NO: 22476
  source 1..35: mol_type = genomic DNA

SEQ ID NO: 58864 - DNA, 40 bp, Homo sapiens; identical to SEQ ID NO: 25916
  source 1..40: mol_type = genomic DNA

SEQ ID NO: 58865 - DNA, 40 bp, Homo sapiens; identical to SEQ ID NO: 28499
  source 1..40: mol_type = genomic DNA

SEQ ID NO: 58866 - DNA, 16 bp, Homo sapiens
  source 1..16: mol_type = genomic DNA
ttagcgcagtaggtag

SEQ ID NO: 58867 - DNA, 20 bp, Homo sapiens
  source 1..20: mol_type = genomic DNA
taaagactttttctctgacc

SEQ ID NO: 58868 - DNA, 24 bp, Homo sapiens
  source 1..24: mol_type = genomic DNA
atcattggtcgtggttgtagtccg

SEQ ID NO: 58869 - DNA, 20 bp, Homo sapiens
  source 1..20: mol_type = genomic DNA
ttacgaccccttatttaccc

SEQ ID NO: 58870 - DNA, 25 bp, Homo sapiens
  source 1..25: mol_type = genomic DNA
agtgtagtggtcatcacgttcgcct

SEQ ID NO: 58871 - DNA, 23 bp, Homo sapiens
  source 1..23: mol_type = genomic DNA
gactctgaatccagcgatccgag

SEQ ID NO: 58872 - DNA, 18 bp, Homo sapiens
  source 1..18: mol_type = genomic DNA
actcatgcccccatgtct

SEQ ID NO: 58873 - DNA, 18 bp, Homo sapiens
  source 1..18: mol_type = genomic DNA
aatagtaccgttaacttc

SEQ ID NO: 58874 - DNA, 16 bp, Homo sapiens
  source 1..16: mol_type = genomic DNA
ttcccattcttgcgac

SEQ ID NO: 58875 - DNA, 19 bp, Homo sapiens
  source 1..19: mol_type = genomic DNA
aagacaggggttaggcctc

SEQ ID NO: 58876 - DNA, 16 bp, Homo sapiens
  source 1..16: mol_type = genomic DNA
cgtagtgtagtggtca

SEQ ID NO: 58877 - DNA, 26 bp, Homo sapiens
  source 1..26: mol_type = genomic DNA
gtggtatagtggtgagcatagctgcc

SEQ ID NO: 58878 - DNA, 36 bp, Homo sapiens; identical to SEQ ID NO: 9299
  source 1..36: mol_type = genomic DNA

SEQ ID NO: 58879 - DNA, 32 bp, Homo sapiens; identical to SEQ ID NO: 12032
  source 1..32: mol_type = genomic DNA

SEQ ID NO: 58880 - DNA, 35 bp, Homo sapiens; identical to SEQ ID NO: 12750
  source 1..35: mol_type = genomic DNA

SEQ ID NO: 58881 - DNA, 39 bp, Homo sapiens; identical to SEQ ID NO: 13185
  source 1..39: mol_type = genomic DNA

SEQ ID NO: 58882 - DNA, 23 bp, Homo sapiens
  source 1..23: mol_type = genomic DNA
gtaatggttagcactctggactc

SEQ ID NO: 58883 - DNA, 23 bp, Homo sapiens
  source 1..23: mol_type = genomic DNA
gcgttggtggtatagtggttagc

SEQ ID NO: 58884 - DNA, 23 bp, Homo sapiens
  source 1..23: mol_type = genomic DNA
gcccccatgtctaacaacatggc

SEQ ID NO: 58885 - DNA, 29 bp, Homo sapiens
  source 1..29: mol_type = genomic DNA
ggagatgaaaacctttttccaaggacacc

SEQ ID NO: 58886 - DNA, 33 bp, Homo sapiens; identical to SEQ ID NO: 27532
  source 1..33: mol_type = genomic DNA

SEQ ID NO: 58887 - DNA, 28 bp, Homo sapiens
  source 1..28: mol_type = genomic DNA
gttaactaagtgtttgtgggtttaagtc

SEQ ID NO: 58888 - DNA, 17 bp, Homo sapiens
  source 1..17: mol_type = genomic DNA
caagtccctgttcgggc

SEQ ID NO: 58889 - DNA, 25 bp, Homo sapiens
  source 1..25: mol_type = genomic DNA
ggggttcgattccttccttttttgc

SEQ ID NO: 58890 - DNA, 46 bp, Homo sapiens; identical to SEQ ID NO: 8799
  source 1..46: mol_type = genomic DNA

SEQ ID NO: 58891 - DNA, 26 bp, Homo sapiens
  source 1..26: mol_type = genomic DNA
gtggttatcacgttcgcctcacacgc

SEQ ID NO: 58892 - DNA, 21 bp, Homo sapiens
  source 1..21: mol_type = genomic DNA
tagcggttatcacattcgcct

SEQ ID NO: 58893 - DNA, 23 bp, Homo sapiens
  source 1..23: mol_type = genomic DNA
tctgaaggtcctgagttcgaacc

SEQ ID NO: 58894 - DNA, 39 bp, Homo sapiens; identical to SEQ ID NO: 3182
  source 1..39: mol_type = genomic DNA

SEQ ID NO: 58895 - DNA, 21 bp, Homo sapiens
  source 1..21: mol_type = genomic DNA
agcgcattggacttctaattc

SEQ ID NO: 58896 - DNA, 48 bp, Homo sapiens; identical to SEQ ID NO: 8079
  source 1..48: mol_type = genomic DNA

SEQ ID NO: 58897 - DNA, 29 bp, Homo sapiens
  source 1..29: mol_type = genomic DNA
cagttgacccgggttcgattcccggccaa

SEQ ID NO: 58898 - DNA, 36 bp, Homo sapiens; identical to SEQ ID NO: 9686
  source 1..36: mol_type = genomic DNA

SEQ ID NO: 58899 - DNA, 22 bp, Homo sapiens
  source 1..22: mol_type = genomic DNA
ttcgaatccggctcggaggacc

SEQ ID NO: 58900 - DNA, 17 bp, Homo sapiens
  source 1..17: mol_type = genomic DNA
agactttttctctgacc

SEQ ID NO: 58901 - DNA, 20 bp, Homo sapiens
  source 1..20: mol_type = genomic DNA
ggccggttagctcagttggt

SEQ ID NO: 58902 - DNA, 26 bp, Homo sapiens
  source 1..26: mol_type = genomic DNA
gtttccgtagtgtagtggttatcacg

SEQ ID NO: 58903 - DNA, 24 bp, Homo sapiens
  source 1..24: mol_type = genomic DNA
tcaacttaacttgaccgctctgac

SEQ ID NO: 58904 - DNA, 20 bp, Homo sapiens
  source 1..20: mol_type = genomic DNA
gctccgaggtgattttcata

SEQ ID NO: 58905 - DNA, 25 bp, Homo sapiens
  source 1..25: mol_type = genomic DNA
gagtgaagcattggactgtaaatct

SEQ ID NO: 58906 - DNA, 22 bp, Homo sapiens
  source 1..22: mol_type = genomic DNA
gtggttgtagtccgtgcgagaa

SEQ ID NO: 58907 - DNA, 26 bp, Homo sapiens
  source 1..26: mol_type = genomic DNA
gagtgaagcattggactgtaaatcta

SEQ ID NO: 58908 - DNA, 29 bp, Homo sapiens
  source 1..29: mol_type = genomic DNA
cggatagctcagtcggtagagcatcagac

SEQ ID NO: 58909 - DNA, 20 bp, Homo sapiens
  source 1..20: mol_type = genomic DNA
gcggttatcacgtctgcttt

SEQ ID NO: 58910 - DNA, 20 bp, Homo sapiens
  source 1..20: mol_type = genomic DNA
gtagtccgtgcgagaatacc

SEQ ID NO: 58911 - DNA, 23 bp, Homo sapiens
  source 1..23: mol_type = genomic DNA
gttcgaatccggctcgaaggacc

SEQ ID NO: 58912 - DNA, 17 bp, Homo sapiens
  source 1..17: mol_type = genomic DNA
tgagtgaagcattggac

SEQ ID NO: 58913 - DNA, 23 bp, Homo sapiens
  source 1..23: mol_type = genomic DNA
gttcgattccccaacggggagcc

SEQ ID NO: 58914 - DNA, 37 bp, Homo sapiens; identical to SEQ ID NO: 398
  source 1..37: mol_type = genomic DNA

SEQ ID NO: 58915 - DNA, 36 bp, Homo sapiens; identical to SEQ ID NO: 1009
  source 1..36: mol_type = genomic DNA

SEQ ID NO: 58916 - DNA, 28 bp, Homo sapiens
  source 1..28: mol_type = genomic DNA
acgcgggagaccggggttcgattccccg

SEQ ID NO: 58917 - DNA, 48 bp, Homo sapiens; identical to SEQ ID NO: 7580
  source 1..48: mol_type = genomic DNA

SEQ ID NO: 58918 - DNA, 33 bp, Homo sapiens; identical to SEQ ID NO: 8819
  source 1..33: mol_type = genomic DNA

SEQ ID NO: 58919 - DNA, 33 bp, Homo sapiens; identical to SEQ ID NO: 18716
  source 1..33: mol_type = genomic DNA

SEQ ID NO: 58920 - DNA, 36 bp, Homo sapiens; identical to SEQ ID NO: 20912
  source 1..36: mol_type = genomic DNA

SEQ ID NO: 58921 - DNA, 26 bp, Homo sapiens
  source 1..26: mol_type = genomic DNA
tactttgatagagtaaataataggag

SEQ ID NO: 58922 - DNA, 33 bp, Homo sapiens; identical to SEQ ID NO: 29376
  source 1..33: mol_type = genomic DNA

SEQ ID NO: 58923 - DNA, 19 bp, Homo sapiens
  source 1..19: mol_type = genomic DNA
taaagactttttctctgac

SEQ ID NO: 58924 - DNA, 31 bp, Homo sapiens; identical to SEQ ID NO: 11097
  source 1..31: mol_type = genomic DNA

SEQ ID NO: 58925 - DNA, 20 bp, Homo sapiens
  source 1..20: mol_type = genomic DNA
gttaactaagtgtttgtggg

SEQ ID NO: 58926 - DNA, 23 bp, Homo sapiens
  source 1..23: mol_type = genomic DNA
gttcaattccccgacggggagcc

SEQ ID NO: 58927 - DNA, 38 bp, Homo sapiens; identical to SEQ ID NO: 8373
  source 1..38: mol_type = genomic DNA

SEQ ID NO: 58928 - DNA, 21 bp, Homo sapiens
  source 1..21: mol_type = genomic DNA
taacagctatccattggtctt

SEQ ID NO: 58929 - DNA, 20 bp, Homo sapiens
  source 1..20: mol_type = genomic DNA
caacattcaaaaaagagtac

SEQ ID NO: 58930 - DNA, 21 bp, Homo sapiens
  source 1..21: mol_type = genomic DNA
cagttgatgcagagtggggtt

SEQ ID NO: 58931 - DNA, 39 bp, Homo sapiens; identical to SEQ ID NO: 1012
  source 1..39: mol_type = genomic DNA

SEQ ID NO: 58932 - DNA, 38 bp, Homo sapiens; identical to SEQ ID NO: 3226
  source 1..38: mol_type = genomic DNA

SEQ ID NO: 58933 - DNA, 42 bp, Homo sapiens; identical to SEQ ID NO: 3455
  source 1..42: mol_type = genomic DNA

SEQ ID NO: 58934 - DNA, 21 bp, Homo sapiens
  source 1..21: mol_type = genomic DNA
tcgagtctcggtggaacctcc

SEQ ID NO: 58935 - DNA, 33 bp, Homo sapiens; identical to SEQ ID NO: 4383
  source 1..33: mol_type = genomic DNA

SEQ ID NO: 58936 - DNA, 26 bp, Homo sapiens
  source 1..26: mol_type = genomic DNA
aggtggcccgggttcgactcccggta

SEQ ID NO: 58937 - DNA, 33 bp, Homo sapiens; identical to SEQ ID NO: 16879
  source 1..33: mol_type = genomic DNA

SEQ ID NO: 58938 - DNA, 40 bp, Homo sapiens; identical to SEQ ID NO: 20229
  source 1..40: mol_type = genomic DNA

SEQ ID NO: 58939 - DNA, 38 bp, Homo sapiens; identical to SEQ ID NO: 20914
  source 1..38: mol_type = genomic DNA

SEQ ID NO: 58940 - DNA, 37 bp, Homo sapiens; identical to SEQ ID NO: 26829
  source 1..37: mol_type = genomic DNA

SEQ ID NO: 58941 - DNA, 18 bp, Homo sapiens
  source 1..18: mol_type = genomic DNA
atggttagcactctggac

SEQ ID NO: 58942 - DNA, 34 bp, Homo sapiens; identical to SEQ ID NO: 16836
  source 1..34: mol_type = genomic DNA

SEQ ID NO: 58943 - DNA, 27 bp, Homo sapiens
  source 1..27: mol_type = genomic DNA
tggtctagtggttaggattcggcgctc

SEQ ID NO: 58944 - DNA, 18 bp, Homo sapiens
  source 1..18: mol_type = genomic DNA
gaaagctcacaagaactg

SEQ ID NO: 58945 - DNA, 34 bp, Homo sapiens; identical to SEQ ID NO: 24011
  source 1..34: mol_type = genomic DNA

SEQ ID NO: 58946 - DNA, 34 bp, Homo sapiens; identical to SEQ ID NO: 19921
  source 1..34: mol_type = genomic DNA

SEQ ID NO: 58947 - DNA, 44 bp, Homo sapiens; identical to SEQ ID NO: 14159
  source 1..44: mol_type = genomic DNA

SEQ ID NO: 58948 - DNA, 16 bp, Homo sapiens
  source 1..16: mol_type = genomic DNA
gttaaagactttttct

SEQ ID NO: 58949 - DNA, 34 bp, Homo sapiens; identical to SEQ ID NO: 4435
  source 1..34: mol_type = genomic DNA

SEQ ID NO: 58950 - DNA, 37 bp, Homo sapiens; identical to SEQ ID NO: 5442
  source 1..37: mol_type = genomic DNA

SEQ ID NO: 58951 - DNA, 25 bp, Homo sapiens
  source 1..25: mol_type = genomic DNA
gtgtaatggttagcactctggactc

SEQ ID NO: 58952 - DNA, 20 bp, Homo sapiens
  source 1..20: mol_type = genomic DNA
agtaaggtcagctaaataag

SEQ ID NO: 58953 - DNA, 19 bp, Homo sapiens
  source 1..19: mol_type = genomic DNA
gggttttgcagtccttacc

SEQ ID NO: 58954 - DNA, 24 bp, Homo sapiens
  source 1..24: mol_type = genomic DNA
agctcagtcggtagagcatcagac

SEQ ID NO: 58955 - DNA, 23 bp, Homo sapiens
  source 1..23: mol_type = genomic DNA
caagaactgctaactcatgcccc

SEQ ID NO: 58956 - DNA, 28 bp, Homo sapiens
  source 1..28: mol_type = genomic DNA
acatggtctagcggttaggattcctggt

SEQ ID NO: 58957 - DNA, 17 bp, Homo sapiens
  source 1..17: mol_type = genomic DNA
gagtgaagcattggact

SEQ ID NO: 58958 - DNA, 21 bp, Homo sapiens
  source 1..21: mol_type = genomic DNA
gtagtggttatcacgtctgct

SEQ ID NO: 58959 - DNA, 40 bp, Homo sapiens; identical to SEQ ID NO: 27170
  source 1..40: mol_type = genomic DNA

SEQ ID NO: 58960 - DNA, 31 bp, Homo sapiens; identical to SEQ ID NO: 17800
  source 1..31: mol_type = genomic DNA

SEQ ID NO: 58961 - DNA, 47 bp, Homo sapiens; identical to SEQ ID NO: 17151
  source 1..47: mol_type = genomic DNA

SEQ ID NO: 58962 - DNA, 25 bp, Homo sapiens
  source 1..25: mol_type = genomic DNA
ctcagtcggtagagcatcagacttt

SEQ ID NO: 58963 - DNA, 24 bp, Homo sapiens
  source 1..24: mol_type = genomic DNA
gagttcaaatctcgctggggcctc

SEQ ID NO: 58964 - DNA, 31 bp, Homo sapiens; identical to SEQ ID NO: 4348
  source 1..31: mol_type = genomic DNA

SEQ ID NO: 58965 - DNA, 43 bp, Homo sapiens; identical to SEQ ID NO: 7621
  source 1..43: mol_type = genomic DNA

SEQ ID NO: 58966 - DNA, 29 bp, Homo sapiens
  source 1..29: mol_type = genomic DNA
cccaggcggcccgggttcgactcccggtg

SEQ ID NO: 58967 - DNA, 38 bp, Homo sapiens; identical to SEQ ID NO: 16176
  source 1..38: mol_type = genomic DNA

SEQ ID NO: 58968 - DNA, 18 bp, Homo sapiens
  source 1..18: mol_type = genomic DNA
gtcaggatggccgagcgg

SEQ ID NO: 58969 - DNA, 30 bp, Homo sapiens; identical to SEQ ID NO: 6404
  source 1..30: mol_type = genomic DNA

SEQ ID NO: 58970 - DNA, 28 bp, Homo sapiens
  source 1..28: mol_type = genomic DNA
tgatcgtatagtggttagtactctgcgt

SEQ ID NO: 58971 - DNA, 20 bp, Homo sapiens
  source 1..20: mol_type = genomic DNA
ggtcgtggttgtagtccgtg

SEQ ID NO: 58972 - DNA, 23 bp, Homo sapiens
  source 1..23: mol_type = genomic DNA
gtggttgtagtccgtgcgagaat

SEQ ID NO: 58973 - DNA, 23 bp, Homo sapiens
  source 1..23: mol_type = genomic DNA
gggggtatagctcagtggtagag

SEQ ID NO: 58974 - DNA, 28 bp, Homo sapiens
  source 1..28: mol_type = genomic DNA
gtggtctagtggttaggattcggcgctc

SEQ ID NO: 58975 - DNA, 24 bp, Homo sapiens
  source 1..24: mol_type = genomic DNA
ggttcgaatcccaccgctgccacc

SEQ ID NO: 58976 - DNA, 22 bp, Homo sapiens
  source 1..22: mol_type = genomic DNA
acaaaacgaatgatttcgactc

SEQ ID NO: 58977 - DNA, 16 bp, Homo sapiens
  source 1..16: mol_type = genomic DNA
agtgaagcattggact

SEQ ID NO: 58978 - DNA, 47 bp, Homo sapiens; identical to SEQ ID NO: 1114
  source 1..47: mol_type = genomic DNA

SEQ ID NO: 58979 - DNA, 41 bp, Homo sapiens; identical to SEQ ID NO: 22706
  source 1..41: mol_type = genomic DNA

SEQ ID NO: 58980 - DNA, 22 bp, Homo sapiens
  source 1..22: mol_type = genomic DNA
ggtagcgtggccgagtggtcta

SEQ ID NO: 58981 - DNA, 17 bp, Homo sapiens
  source 1..17: mol_type = genomic DNA
ggtagcgtggccgagcg

SEQ ID NO: 58982 - DNA, 22 bp, Homo sapiens
  source 1..22: mol_type = genomic DNA
gttaggattcggcgctctcacc

SEQ ID NO: 58983 - DNA, 47 bp, Homo sapiens; identical to SEQ ID NO: 977
  source 1..47: mol_type = genomic DNA

SEQ ID NO: 58984 - DNA, 37 bp, Homo sapiens; identical to SEQ ID NO: 9433
  source 1..37: mol_type = genomic DNA

SEQ ID NO: 58985 - DNA, 31 bp, Homo sapiens; identical to SEQ ID NO: 13601
  source 1..31: mol_type = genomic DNA

SEQ ID NO: 58986 - DNA, 31 bp, Homo sapiens; identical to SEQ ID NO: 17725
  source 1..31: mol_type = genomic DNA

SEQ ID NO: 58987 - DNA, 25 bp, Homo sapiens
  source 1..25: mol_type = genomic DNA
gtggtagaattctcgcctgccacgc

SEQ ID NO: 58988 - DNA, 26 bp, Homo sapiens
  source 1..26: mol_type = genomic DNA
taaaccaggggtcgcgagttcaaatc

SEQ ID NO: 58989 - DNA, 28 bp, Homo sapiens
  source 1..28: mol_type = genomic DNA
tccagggttcaagtccctgttcaggcgc

SEQ ID NO: 58990 - DNA, 22 bp, Homo sapiens
  source 1..22: mol_type = genomic DNA
agttaaagactttttctctgac

SEQ ID NO: 58991 - DNA, 25 bp, Homo sapiens
  source 1..25: mol_type = genomic DNA
ggtagcgtggccgagtggtctaagg

SEQ ID NO: 58992 - DNA, 32 bp, Homo sapiens; identical to SEQ ID NO: 21797
  source 1..32: mol_type = genomic DNA

SEQ ID NO: 58993 - DNA, 36 bp, Homo sapiens; identical to SEQ ID NO: 10599
  source 1..36: mol_type = genomic DNA

SEQ ID NO: 58994 - DNA, 30 bp, Homo sapiens; identical to SEQ ID NO: 31052
  source 1..30: mol_type = genomic DNA

SEQ ID NO: 58995 - DNA, 41 bp, Homo sapiens; identical to SEQ ID NO: 28911
  source 1..41: mol_type = genomic DNA

SEQ ID NO: 58996 - DNA, 22 bp, Homo sapiens
  source 1..22: mol_type = genomic DNA
gactcaagttctggtctccgga

SEQ ID NO: 58997 - DNA, 27 bp, Homo sapiens
  source 1..27: mol_type = genomic DNA
cgctctcaccgccgcggcccgggttcg

SEQ ID NO: 58998 - DNA, 30 bp, Homo sapiens; identical to SEQ ID NO: 15331
  source 1..30: mol_type = genomic DNA

SEQ ID NO: 58999 - DNA, 48 bp, Homo sapiens; identical to SEQ ID NO: 1630
  source 1..48: mol_type = genomic DNA

SEQ ID NO: 59000 - DNA, 32 bp, Homo sapiens; identical to SEQ ID NO: 4659
  source 1..32: mol_type = genomic DNA

SEQ ID NO: 59001 - DNA, 46 bp, Homo sapiens; identical to SEQ ID NO: 4928
  source 1..46: mol_type = genomic DNA

SEQ ID NO: 59002 - DNA, 38 bp, Homo sapiens; identical to SEQ ID NO: 9196
  source 1..38: mol_type = genomic DNA

SEQ ID NO: 59003 - DNA, 31 bp, Homo sapiens; identical to SEQ ID NO: 10266
  source 1..31: mol_type = genomic DNA

SEQ ID NO: 59004 - DNA, 33 bp, Homo sapiens; identical to SEQ ID NO: 10496
  source 1..33: mol_type = genomic DNA

SEQ ID NO: 59005 - DNA, 32 bp, Homo sapiens; identical to SEQ ID NO: 12597
  source 1..32: mol_type = genomic DNA

SEQ ID NO: 59006 - DNA, 43 bp, Homo sapiens; identical to SEQ ID NO: 17586
  source 1..43: mol_type = genomic DNA

SEQ ID NO: 59007 - DNA, 33 bp, Homo sapiens; identical to SEQ ID NO: 20206
  source 1..33: mol_type = genomic DNA

SEQ ID NO: 59008 - DNA, 33 bp, Homo sapiens; identical to SEQ ID NO: 21754
  source 1..33: mol_type = genomic DNA

SEQ ID NO: 59009 - DNA, 27 bp, Homo sapiens
  source 1..27: mol_type = genomic DNA
tagtggttatcacgttcgcctcacacg

SEQ ID NO: 59010 - DNA, 18 bp, Homo sapiens
  source 1..18: mol_type = genomic DNA
gtggttagtactctgcgt

SEQ ID NO: 59011 - DNA, 21 bp, Homo sapiens
  source 1..21: mol_type = genomic DNA
tggtcgtggttgtagtccgtg

SEQ ID NO: 59012 - DNA, 23 bp, Homo sapiens
  source 1..23: mol_type = genomic DNA
gtatagtggttagtactctgcgt

SEQ ID NO: 59013 - DNA, 32 bp, Homo sapiens; identical to SEQ ID NO: 25532
  source 1..32: mol_type = genomic DNA

SEQ ID NO: 59014 - DNA, 20 bp, Homo sapiens
  source 1..20: mol_type = genomic DNA
catgggtggttcagtggtag

SEQ ID NO: 59015 - DNA, 34 bp, Homo sapiens; identical to SEQ ID NO: 17431
  source 1..34: mol_type = genomic DNA

SEQ ID NO: 59016 - DNA, 30 bp, Homo sapiens; identical to SEQ ID NO: 130
  source 1..30: mol_type = genomic DNA

SEQ ID NO: 59017 - DNA, 30 bp, Homo sapiens; identical to SEQ ID NO: 28883
  source 1..30: mol_type = genomic DNA

SEQ ID NO: 59018 - DNA, 26 bp, Homo sapiens
  source 1..26: mol_type = genomic DNA
ccgaaaatgttggttatacccttccc

SEQ ID NO: 59019 - DNA, 35 bp, Homo sapiens; identical to SEQ ID NO: 29265
  source 1..35: mol_type = genomic DNA

SEQ ID NO: 59020 - DNA, 17 bp, Homo sapiens
  source 1..17: mol_type = genomic DNA
gcagcaacctcggttcg

SEQ ID NO: 59021 - DNA, 22 bp, Homo sapiens
  source 1..22: mol_type = genomic DNA
tcaattcccggccaatgcacca

SEQ ID NO: 59022 - DNA, 37 bp, Homo sapiens; identical to SEQ ID NO: 3225
  source 1..37: mol_type = genomic DNA

SEQ ID NO: 59023 - DNA, 35 bp, Homo sapiens; identical to SEQ ID NO: 4436
  source 1..35: mol_type = genomic DNA

SEQ ID NO: 59024 - DNA, 26 bp, Homo sapiens
  source 1..26: mol_type = genomic DNA
gcccccatgtctaacaacatggcttt

SEQ ID NO: 59025 - DNA, 24 bp, Homo sapiens
  source 1..24: mol_type = genomic DNA
acaacagaggcttacgacccctta

SEQ ID NO: 59026 - DNA, 48 bp, Homo sapiens; identical to SEQ ID NO: 6769
  source 1..48: mol_type = genomic DNA

SEQ ID NO: 59027 - DNA, 26 bp, Homo sapiens
  source 1..26: mol_type = genomic DNA
catatgtccgcgtgggttcgaacccc

SEQ ID NO: 59028 - DNA, 35 bp, Homo sapiens; identical to SEQ ID NO: 14393
  source 1..35: mol_type = genomic DNA

SEQ ID NO: 59029 - DNA, 44 bp, Homo sapiens; identical to SEQ ID NO: 17121
  source 1..44: mol_type = genomic DNA

SEQ ID NO: 59030 - DNA, 25 bp, Homo sapiens
  source 1..25: mol_type = genomic DNA
ggagttaaagactttttctctgacc

SEQ ID NO: 59031 - DNA, 18 bp, Homo sapiens
  source 1..18: mol_type = genomic DNA
agtgaagcattggactgt

SEQ ID NO: 59032 - DNA, 22 bp, Homo sapiens
  source 1..22: mol_type = genomic DNA
tagtggttaggattcggcgctc

SEQ ID NO: 59033 - DNA, 28 bp, Homo sapiens
  source 1..28: mol_type = genomic DNA
aaaatggctgagtgaagcattggactgt

SEQ ID NO: 59034 - DNA, 17 bp, Homo sapiens
  source 1..17: mol_type = genomic DNA
tcctatatatcttacca

SEQ ID NO: 59035 - DNA, 32 bp, Homo sapiens; identical to SEQ ID NO: 20185
  source 1..32: mol_type = genomic DNA

SEQ ID NO: 59036 - DNA, 22 bp, Homo sapiens
  source 1..22: mol_type = genomic DNA
cgtggttgtagtccgtgcgaga

SEQ ID NO: 59037 - DNA, 29 bp, Homo sapiens
  source 1..29: mol_type = genomic DNA
gacaggggttaggcctctttttaccacca

SEQ ID NO: 59038 - DNA, 19 bp, Homo sapiens
  source 1..19: mol_type = genomic DNA
taggcctctttttaccacc

SEQ ID NO: 59039 - DNA, 25 bp, Homo sapiens
  source 1..25: mol_type = genomic DNA
acagctatccattggtcttaggccc

SEQ ID NO: 59040 - DNA, 21 bp, Homo sapiens
  source 1..21: mol_type = genomic DNA
ttctgtagtgtagtggttatc

SEQ ID NO: 59041 - DNA, 41 bp, Homo sapiens; identical to SEQ ID NO: 23366
  source 1..41: mol_type = genomic DNA

SEQ ID NO: 59042 - DNA, 43 bp, Homo sapiens; identical to SEQ ID NO: 19903
  source 1..43: mol_type = genomic DNA

SEQ ID NO: 59043 - DNA, 20 bp, Homo sapiens
  source 1..20: mol_type = genomic DNA
ggatggccgagtggtctaag

SEQ ID NO: 59044 - DNA, 23 bp, Homo sapiens
  source 1..23: mol_type = genomic DNA
tctcagggatgggttcgattctc

SEQ ID NO: 59045 - DNA, 31 bp, Homo sapiens; identical to SEQ ID NO: 1153
  source 1..31: mol_type = genomic DNA

SEQ ID NO: 59046 - DNA, 39 bp, Homo sapiens; identical to SEQ ID NO: 6035
  source 1..39: mol_type = genomic DNA

SEQ ID NO: 59047 - DNA, 36 bp, Homo sapiens; identical to SEQ ID NO: 6784
  source 1..36: mol_type = genomic DNA

SEQ ID NO: 59048 - DNA, 32 bp, Homo sapiens; identical to SEQ ID NO: 9799
  source 1..32: mol_type = genomic DNA

SEQ ID NO: 59049 - DNA, 34 bp, Homo sapiens; identical to SEQ ID NO: 10672
  source 1..34: mol_type = genomic DNA

SEQ ID NO: 59050 - DNA, 45 bp, Homo sapiens; identical to SEQ ID NO: 21545
  source 1..45: mol_type = genomic DNA

SEQ ID NO: 59051 - DNA, 20 bp, Homo sapiens
  source 1..20: mol_type = genomic DNA
gtctctgtggcgcaatcggt

SEQ ID NO: 59052 - DNA, 22 bp, Homo sapiens
  source 1..22: mol_type = genomic DNA
ctgtcacgcgggagaccggggt

SEQ ID NO: 59053 - DNA, 23 bp, Homo sapiens
  source 1..23: mol_type = genomic DNA
gttcgattccccgacggggagcc

SEQ ID NO: 59054 - DNA, 18 bp, Homo sapiens
  source 1..18: mol_type = genomic DNA
ggttttgcagtccttacc

SEQ ID NO: 59055 - DNA, 36 bp, Homo sapiens; identical to SEQ ID NO: 21176
  source 1..36: mol_type = genomic DNA

SEQ ID NO: 59056 - DNA, 35 bp, Homo sapiens; identical to SEQ ID NO: 20368
  source 1..35: mol_type = genomic DNA

SEQ ID NO: 59057 - DNA, 16 bp, Homo sapiens
  source 1..16: mol_type = genomic DNA
atccggctcggaggac

SEQ ID NO: 59058 - DNA, 30 bp, Homo sapiens; identical to SEQ ID NO: 26928
  source 1..30: mol_type = genomic DNA

SEQ ID NO: 59059 - DNA, 28 bp, Homo sapiens
  source 1..28: mol_type = genomic DNA
agtaagttgcaatacttaatttctgcca

SEQ ID NO: 59060 - DNA, 18 bp, Homo sapiens
  source 1..18: mol_type = genomic DNA
cgatcccgggtttcggca

SEQ ID NO: 59061 - DNA, 23 bp, Homo sapiens
  source 1..23: mol_type = genomic DNA
gttcgattcccggccaacgcacc

SEQ ID NO: 59062 - DNA, 28 bp, Homo sapiens
  source 1..28: mol_type = genomic DNA
gcccccatgtctaacaacatggctttct

SEQ ID NO: 59063 - DNA, 46 bp, Homo sapiens; identical to SEQ ID NO: 21734
  source 1..46: mol_type = genomic DNA

SEQ ID NO: 59064 - DNA, 30 bp, Homo sapiens; identical to SEQ ID NO: 8396
  source 1..30: mol_type = genomic DNA

SEQ ID NO: 59065 - DNA, 21 bp, Homo sapiens
  source 1..21: mol_type = genomic DNA
actcaagttctggtctccgga

SEQ ID NO: 59066 - DNA, 26 bp, Homo sapiens
  source 1..26: mol_type = genomic DNA
gagatgaaaacctttttccaaggaca

SEQ ID NO: 59067 - DNA, 17 bp, Homo sapiens
  source 1..17: mol_type = genomic DNA
gtcccatctgggtcgcc

SEQ ID NO: 59068 - DNA, 21 bp, Homo sapiens
  source 1..21: mol_type = genomic DNA
gtggtagagcgcatgctttgc

SEQ ID NO: 59069 - DNA, 34 bp, Homo sapiens; identical to SEQ ID NO: 12250
  source 1..34: mol_type = genomic DNA

SEQ ID NO: 59070 - DNA, 37 bp, Homo sapiens; identical to SEQ ID NO: 13652
  source 1..37: mol_type = genomic DNA

SEQ ID NO: 59071 - DNA, 24 bp, Homo sapiens
  source 1..24: mol_type = genomic DNA
aacagaggcttacgaccccttatt

SEQ ID NO: 59072 - DNA, 38 bp, Homo sapiens; identical to SEQ ID NO: 3115
  source 1..38: mol_type = genomic DNA

SEQ ID NO: 59073 - DNA, 31 bp, Homo sapiens; identical to SEQ ID NO: 3920
  source 1..31: mol_type = genomic DNA

SEQ ID NO: 59074 - DNA, 31 bp, Homo sapiens; identical to SEQ ID NO: 8938
  source 1..31: mol_type = genomic DNA

SEQ ID NO: 59075 - DNA, 44 bp, Homo sapiens; identical to SEQ ID NO: 10204
  source 1..44: mol_type = genomic DNA

SEQ ID NO: 59076 - DNA, 30 bp, Homo sapiens; identical to SEQ ID NO: 10503
  source 1..30: mol_type = genomic DNA

SEQ ID NO: 59077 - DNA, 31 bp, Homo sapiens; identical to SEQ ID NO: 10815
  source 1..31: mol_type = genomic DNA

SEQ ID NO: 59078 - DNA, 39 bp, Homo sapiens; identical to SEQ ID NO: 11188
  source 1..39: mol_type = genomic DNA

SEQ ID NO: 59079 - DNA, 23 bp, Homo sapiens
  source 1..23: mol_type = genomic DNA
cctcctcaaagcaatacactgaa

SEQ ID NO: 59080 - DNA, 48 bp, Homo sapiens; identical to SEQ ID NO: 11606
  source 1..48: mol_type = genomic DNA

SEQ ID NO: 59081 - DNA, 32 bp, Homo sapiens; identical to SEQ ID NO: 16878
  source 1..32: mol_type = genomic DNA

SEQ ID NO: 59082 - DNA, 34 bp, Homo sapiens; identical to SEQ ID NO: 18767
  source 1..34: mol_type = genomic DNA

SEQ ID NO: 59083 - DNA, 37 bp, Homo sapiens; identical to SEQ ID NO: 22497
  source 1..37: mol_type = genomic DNA

SEQ ID NO: 59084 - DNA, 19 bp, Homo sapiens
  source 1..19: mol_type = genomic DNA
taagctatcgggcccatac

SEQ ID NO: 59085 - DNA, 34 bp, Homo sapiens; identical to SEQ ID NO: 23712
  source 1..34: mol_type = genomic DNA

SEQ ID NO: 59086 - DNA, 22 bp, Homo sapiens
  source 1..22: mol_type = genomic DNA
aacttaacttgaccgctctgac

SEQ ID NO: 59087 - DNA, 20 bp, Homo sapiens
  source 1..20: mol_type = genomic DNA
taatggttagcactctggac

SEQ ID NO: 59088 - DNA, 22 bp, Homo sapiens
  source 1..22: mol_type = genomic DNA
aacatcagattgtgaatctgac

SEQ ID NO: 59089 - DNA, 28 bp, Homo sapiens
  source 1..28: mol_type = genomic DNA
atcattggtcgtggttgtagtccgtgcg

SEQ ID NO: 59090 - DNA, 16 bp, Homo sapiens
  source 1..16: mol_type = genomic DNA
gtgtgaggtcccgggt

SEQ ID NO: 59091 - DNA, 23 bp, Homo sapiens
  source 1..23: mol_type = genomic DNA
agaactgctaactcatgccccca

SEQ ID NO: 59092 - DNA, 21 bp, Homo sapiens
  source 1..21: mol_type = genomic DNA
gcttcaaacctgccggggctt

SEQ ID NO: 59093 - DNA, 23 bp, Homo sapiens
  source 1..23: mol_type = genomic DNA
ggtaaaatggctgagtgaagcat

SEQ ID NO: 59094 - DNA, 20 bp, Homo sapiens
  source 1..20: mol_type = genomic DNA
ccgaaaatgttggttatacc

SEQ ID NO: 59095 - DNA, 23 bp, Homo sapiens
  source 1..23: mol_type = genomic DNA
agttgcaatacttaatttctgcc

SEQ ID NO: 59096 - DNA, 22 bp, Homo sapiens
  source 1..22: mol_type = genomic DNA
ttcgattccggctcgaaggacc

SEQ ID NO: 59097 - DNA, 25 bp, Homo sapiens
  source 1..25: mol_type = genomic DNA
ggagcttaaacccccttatttctac

SEQ ID NO: 59098 - DNA, 22 bp, Homo sapiens
  source 1..22: mol_type = genomic DNA
gttcgatcccgggtttcggcac

SEQ ID NO: 59099 - DNA, 18 bp, Homo sapiens
  source 1..18: mol_type = genomic DNA
tggtgagtatccccgcct

SEQ ID NO: 59100 - DNA, 42 bp, Homo sapiens; identical to SEQ ID NO: 22550
  source 1..42: mol_type = genomic DNA

SEQ ID NO: 59101 - DNA, 21 bp, Homo sapiens
  source 1..21: mol_type = genomic DNA
gaaaacctttttccaaggaca

SEQ ID NO: 59102 - DNA, 31 bp, Homo sapiens; identical to SEQ ID NO: 3156
  source 1..31: mol_type = genomic DNA

SEQ ID NO: 59103 - DNA, 26 bp, Homo sapiens
  source 1..26: mol_type = genomic DNA
cagttgatgcagagtggggttttgca

SEQ ID NO: 59104 - DNA, 23 bp, Homo sapiens
  source 1..23: mol_type = genomic DNA
gagttaaagactttttctctgac

SEQ ID NO: 59105 - DNA, 35 bp, Homo sapiens; identical to SEQ ID NO: 1481
  source 1..35: mol_type = genomic DNA

SEQ ID NO: 59106 - DNA, 31 bp, Homo sapiens; identical to SEQ ID NO: 2705
  source 1..31: mol_type = genomic DNA

SEQ ID NO: 59107 - DNA, 31 bp, Homo sapiens; identical to SEQ ID NO: 4260
  source 1..31: mol_type = genomic DNA

SEQ ID NO: 59108 - DNA, 17 bp, Homo sapiens
  source 1..17: mol_type = genomic DNA
ctggttcgattccggct

SEQ ID NO: 59109 - DNA, 35 bp, Homo sapiens; identical to SEQ ID NO: 16405
  source 1..35: mol_type = genomic DNA

SEQ ID NO: 59110 - DNA, 35 bp, Homo sapiens; identical to SEQ ID NO: 16692
  source 1..35: mol_type = genomic DNA

SEQ ID NO: 59111 - DNA, 34 bp, Homo sapiens; identical to SEQ ID NO: 16880
  source 1..34: mol_type = genomic DNA

SEQ ID NO: 59112 - DNA, 24 bp, Homo sapiens
  source 1..24: mol_type = genomic DNA
tcagattgtgaatctgacaacaga

SEQ ID NO: 59113 - DNA, 40 bp, Homo sapiens; identical to SEQ ID NO: 25685
  source 1..40: mol_type = genomic DNA

SEQ ID NO: 59114 - DNA, 17 bp, Homo sapiens
  source 1..17: mol_type = genomic DNA
ttcccggccagggaacc

SEQ ID NO: 59115 - DNA, 17 bp, Homo sapiens
  source 1..17: mol_type = genomic DNA
aagactttttctctgac

SEQ ID NO: 59116 - DNA, 29 bp, Homo sapiens
  source 1..29: mol_type = genomic DNA
ccatggtgtaatggttagcactctggact

SEQ ID NO: 59117 - DNA, 30 bp, Homo sapiens; identical to SEQ ID NO: 25831
  source 1..30: mol_type = genomic DNA

SEQ ID NO: 59118 - DNA, 36 bp, Homo sapiens; identical to SEQ ID NO: 21757
  source 1..36: mol_type = genomic DNA

SEQ ID NO: 59119 - DNA, 36 bp, Homo sapiens; identical to SEQ ID NO: 3484
  source 1..36: mol_type = genomic DNA

SEQ ID NO: 59120 - DNA, 17 bp, Homo sapiens
  source 1..17: mol_type = genomic DNA
cccagtggcctaatgga

SEQ ID NO: 59121 - DNA, 19 bp, Homo sapiens
  source 1..19: mol_type = genomic DNA
aacccccttatttctacca

SEQ ID NO: 59122 - DNA, 24 bp, Homo sapiens
  source 1..24: mol_type = genomic DNA
gacaacattcaaaaaagagtacca

SEQ ID NO: 59123 - DNA, 27 bp, Homo sapiens
  source 1..27: mol_type = genomic DNA
gctgagtgaagcattggactgtaaatc

SEQ ID NO: 59124 - DNA, 18 bp, Homo sapiens
  source 1..18: mol_type = genomic DNA
aacacctctttacagtga

SEQ ID NO: 59125 - DNA, 26 bp, Homo sapiens
  source 1..26: mol_type = genomic DNA
cagagtggggttttgcagtccttacc

SEQ ID NO: 59126 - DNA, 24 bp, Homo sapiens
  source 1..24: mol_type = genomic DNA
accaaaacatcagattgtgaatct

SEQ ID NO: 59127 - DNA, 22 bp, Homo sapiens
  source 1..22: mol_type = genomic DNA
ttaggagatttcaacttaactt

SEQ ID NO: 59128 - DNA, 20 bp, Homo sapiens
  source 1..20: mol_type = genomic DNA
tcaaatctcggtgggacctc

SEQ ID NO: 59129 - DNA, 16 bp, Homo sapiens
  source 1..16: mol_type = genomic DNA
ttttgcagtccttacc

SEQ ID NO: 59130 - DNA, 34 bp, Homo sapiens; identical to SEQ ID NO: 4780
  source 1..34: mol_type = genomic DNA

SEQ ID NO: 59131 - DNA, 48 bp, Homo sapiens; identical to SEQ ID NO: 13308
  source 1..48: mol_type = genomic DNA

SEQ ID NO: 59132 - DNA, 45 bp, Homo sapiens; identical to SEQ ID NO: 16995
  source 1..45: mol_type = genomic DNA

SEQ ID NO: 59133 - DNA, 48 bp, Homo sapiens; identical to SEQ ID NO: 18364
  source 1..48: mol_type = genomic DNA

SEQ ID NO: 59134 - DNA, 35 bp, Homo sapiens; identical to SEQ ID NO: 18413
  source 1..35: mol_type = genomic DNA

SEQ ID NO: 59135 - DNA, 48 bp, Homo sapiens; identical to SEQ ID NO: 25718
  source 1..48: mol_type = genomic DNA

SEQ ID NO: 59136 - DNA, 20 bp, Homo sapiens
  source 1..20: mol_type = genomic DNA
tcgaaaccgggcagaagcac

SEQ ID NO: 59137 - DNA, 16 bp, Homo sapiens
  source 1..16: mol_type = genomic DNA
tcttaatcccagggtc

SEQ ID NO: 59138 - DNA, 34 bp, Homo sapiens; identical to SEQ ID NO: 27243
  source 1..34: mol_type = genomic DNA

SEQ ID NO: 59139 - DNA, 22 bp, Homo sapiens
  source 1..22: mol_type = genomic DNA
tatagtggttagtactctgcgt

SEQ ID NO: 59140 - DNA, 23 bp, Homo sapiens
  source 1..23: mol_type = genomic DNA
gcttaaacccccttatttctacc

SEQ ID NO: 59141 - DNA, 22 bp, Homo sapiens
  source 1..22: mol_type = genomic DNA
tagtactctgcgttgtggccgc

SEQ ID NO: 59142 - DNA, 25 bp, Homo sapiens
  source 1..25: mol_type = genomic DNA
gtctaacaacatggctttctcacca

SEQ ID NO: 59143 - DNA, 27 bp, Homo sapiens
  source 1..27: mol_type = genomic DNA
gcataggtggttcagtggtagaattct

SEQ ID NO: 59144 - DNA, 34 bp, Homo sapiens; identical to SEQ ID NO: 16563
  source 1..34: mol_type = genomic DNA

SEQ ID NO: 59145 - DNA, 37 bp, Homo sapiens; identical to SEQ ID NO: 3485
  source 1..37: mol_type = genomic DNA

SEQ ID NO: 59146 - DNA, 25 bp, Homo sapiens
  source 1..25: mol_type = genomic DNA
ggagaccggggttcgattccccgac

SEQ ID NO: 59147 - DNA, 19 bp, Homo sapiens
  source 1..19: mol_type = genomic DNA
gttcgattcccggccaatg

SEQ ID NO: 59148 - DNA, 19 bp, Homo sapiens
  source 1..19: mol_type = genomic DNA
agcacccaacttacactta

SEQ ID NO: 59149 - DNA, 16 bp, Homo sapiens
  source 1..16: mol_type = genomic DNA
tccttccttttttgcc

SEQ ID NO: 59150 - DNA, 41 bp, Homo sapiens; identical to SEQ ID NO: 13160
  source 1..41: mol_type = genomic DNA

SEQ ID NO: 59151 - DNA, 21 bp, Homo sapiens
  source 1..21: mol_type = genomic DNA
acagaggcttacgacccctta

SEQ ID NO: 59152 - DNA, 21 bp, Homo sapiens
  source 1..21: mol_type = genomic DNA
gcggcccgggttcgattcccg

SEQ ID NO: 59153 - DNA, 48 bp, Homo sapiens; identical to SEQ ID NO: 2740
  source 1..48: mol_type = genomic DNA

SEQ ID NO: 59154 - DNA, 36 bp, Homo sapiens; identical to SEQ ID NO: 4716
  source 1..36: mol_type = genomic DNA

SEQ ID NO: 59155 - DNA, 34 bp, Homo sapiens; identical to SEQ ID NO: 6230
  source 1..34: mol_type = genomic DNA

SEQ ID NO: 59156 - DNA, 36 bp, Homo sapiens; identical to SEQ ID NO: 6797
  source 1..36: mol_type = genomic DNA

SEQ ID NO: 59157 - DNA, 30 bp, Homo sapiens; identical to SEQ ID NO: 9228
  source 1..30: mol_type = genomic DNA

SEQ ID NO: 59158 - DNA, 37 bp, Homo sapiens; identical to SEQ ID NO: 13206
  source 1..37: mol_type = genomic DNA

SEQ ID NO: 59159 - DNA, 31 bp, Homo sapiens; identical to SEQ ID NO: 15255
  source 1..31: mol_type = genomic DNA

SEQ ID NO: 59160 - DNA, 42 bp, Homo sapiens; identical to SEQ ID NO: 26330
  source 1..42: mol_type = genomic DNA

SEQ ID NO: 59161 - DNA, 34 bp, Homo sapiens; identical to SEQ ID NO: 26407
  source 1..34: mol_type = genomic DNA

SEQ ID NO: 59162 - DNA, 32 bp, Homo sapiens; identical to SEQ ID NO: 30424
  source 1..32: mol_type = genomic DNA

SEQ ID NO: 59163 - DNA, 38 bp, Homo sapiens; identical to SEQ ID NO: 31188
  source 1..38: mol_type = genomic DNA

SEQ ID NO: 59164 - DNA, 24 bp, Homo sapiens
  source 1..24: mol_type = genomic DNA
gcgttggtggtatagtggtgagca

SEQ ID NO: 59165 - DNA, 18 bp, Homo sapiens
  source 1..18: mol_type = genomic DNA
aaagactttttctctgac

SEQ ID NO: 59166 - DNA, 20 bp, Homo sapiens
  source 1..20: mol_type = genomic DNA
gggggtgtagctcagtggta

SEQ ID NO: 59167 - DNA, 22 bp, Homo sapiens
  source 1..22: mol_type = genomic DNA
gacctcgtggcgcaatggtagc

SEQ ID NO: 59168 - DNA, 27 bp, Homo sapiens
  source 1..27: mol_type = genomic DNA
ggtggagttaaagactttttctctgac

SEQ ID NO: 59169 - DNA, 18 bp, Homo sapiens
  source 1..18: mol_type = genomic DNA
gcttctgtagtgtagtgg

SEQ ID NO: 59170 - DNA, 27 bp, Homo sapiens
  source 1..27: mol_type = genomic DNA
ggtcgtggttgtagtccgtgcgagaat

SEQ ID NO: 59171 - DNA, 32 bp, Homo sapiens; identical to SEQ ID NO: 6210
  source 1..32: mol_type = genomic DNA

SEQ ID NO: 59172 - DNA, 17 bp, Homo sapiens
  source 1..17: mol_type = genomic DNA
cagttgacccgggttcg

SEQ ID NO: 59173 - DNA, 32 bp, Homo sapiens; identical to SEQ ID NO: 19933
  source 1..32: mol_type = genomic DNA

SEQ ID NO: 59174 - DNA, 23 bp, Homo sapiens
  source 1..23: mol_type = genomic DNA
cagtcggtagagcatcagacttt

SEQ ID NO: 59175 - DNA, 24 bp, Homo sapiens
  source 1..24: mol_type = genomic DNA
ggttcaattccccgacggggagcc

SEQ ID NO: 59176 - DNA, 25 bp, Homo sapiens
  source 1..25: mol_type = genomic DNA
ggttagcactctggactttgaatcc

SEQ ID NO: 59177 - DNA, 19 bp, Homo sapiens
  source 1..19: mol_type = genomic DNA
ggttaggcctctttttacc

SEQ ID NO: 59178 - DNA, 19 bp, Homo sapiens
  source 1..19: mol_type = genomic DNA
tcaaatcccggacgagccc

SEQ ID NO: 59179 - DNA, 30 bp, Homo sapiens; identical to SEQ ID NO: 26847
  source 1..30: mol_type = genomic DNA

SEQ ID NO: 59180 - DNA, 36 bp, Homo sapiens; identical to SEQ ID NO: 16833
  source 1..36: mol_type = genomic DNA

SEQ ID NO: 59181 - DNA, 30 bp, Homo sapiens; identical to SEQ ID NO: 13061
  source 1..30: mol_type = genomic DNA

SEQ ID NO: 59182 - DNA, 28 bp, Homo sapiens
  source 1..28: mol_type = genomic DNA
gagatgaaaacctttttccaaggacacc

SEQ ID NO: 59183 - DNA, 24 bp, Homo sapiens
  source 1..24: mol_type = genomic DNA
aagttgcaatacttaatttctgcc

SEQ ID NO: 59184 - DNA, 16 bp, Homo sapiens
  source 1..16: mol_type = genomic DNA
aatacagaccaagagc

SEQ ID NO: 59185 - DNA, 29 bp, Homo sapiens
  source 1..29: mol_type = genomic DNA
agattaagagaaccaacacctctttacag

SEQ ID NO: 59186 - DNA, 26 bp, Homo sapiens
  source 1..26: mol_type = genomic DNA
gctctcaccgccgcggcccgggttcg

SEQ ID NO: 59187 - DNA, 28 bp, Homo sapiens
  source 1..28: mol_type = genomic DNA
gtgagcactctggactctgaatccagcg

SEQ ID NO: 59188 - DNA, 32 bp, Homo sapiens; identical to SEQ ID NO: 206
  source 1..32: mol_type = genomic DNA

SEQ ID NO: 59189 - DNA, 27 bp, Homo sapiens
  source 1..27: mol_type = genomic DNA
agaggcttacgaccccttatttacccc

SEQ ID NO: 59190 - DNA, 29 bp, Homo sapiens
  source 1..29: mol_type = genomic DNA
ccatagtgtagtggttatcacgtctgctt

SEQ ID NO: 59191 - DNA, 28 bp, Homo sapiens
  source 1..28: mol_type = genomic DNA
ctagctcagtcggtagagcatgagactc

SEQ ID NO: 59192 - DNA, 17 bp, Homo sapiens
  source 1..17: mol_type = genomic DNA
ggttcgatcccgggttt

SEQ ID NO: 59193 - DNA, 27 bp, Homo sapiens
  source 1..27: mol_type = genomic DNA
taaattagaatcttagctttgggtgct

SEQ ID NO: 59194 - DNA, 40 bp, Homo sapiens; identical to SEQ ID NO: 23028
  source 1..40: mol_type = genomic DNA

SEQ ID NO: 59195 - DNA, 21 bp, Homo sapiens
  source 1..21: mol_type = genomic DNA
gacgaggtggccgagtggtta

SEQ ID NO: 59196 - DNA, 16 bp, Homo sapiens
  source 1..16: mol_type = genomic DNA
aaatgttggttatacc

SEQ ID NO: 59197 - DNA, 37 bp, Homo sapiens; identical to SEQ ID NO: 2311
  source 1..37: mol_type = genomic DNA

SEQ ID NO: 59198 - DNA, 24 bp, Homo sapiens
  source 1..24: mol_type = genomic DNA
cccattcttgcgacccgggttcga

SEQ ID NO: 59199 - DNA, 28 bp, Homo sapiens
  source 1..28: mol_type = genomic DNA
cgtgggttcgaatcccaccctcgtcgcc

SEQ ID NO: 59200 - DNA, 31 bp, Homo sapiens; identical to SEQ ID NO: 14000
  source 1..31: mol_type = genomic DNA

SEQ ID NO: 59201 - DNA, 18 bp, Homo sapiens
  source 1..18: mol_type = genomic DNA
gtcccggcagagatgcca

SEQ ID NO: 59202 - DNA, 33 bp, Homo sapiens; identical to SEQ ID NO: 23909
  source 1..33: mol_type = genomic DNA

SEQ ID NO: 59203 - DNA, 35 bp, Homo sapiens; identical to SEQ ID NO: 27074
  source 1..35: mol_type = genomic DNA

SEQ ID NO: 59204 - DNA, 23 bp, Homo sapiens
  source 1..23: mol_type = genomic DNA
tatcattggtcgtggttgtagtc

SEQ ID NO: 59205 - DNA, 16 bp, Homo sapiens
  source 1..16: mol_type = genomic DNA
ggttagtactctgcgt

SEQ ID NO: 59206 - DNA, 21 bp, Homo sapiens
  source 1..21: mol_type = genomic DNA
gtaatggttagcactctggac

SEQ ID NO: 59207 - DNA, 20 bp, Homo sapiens
  source 1..20: mol_type = genomic DNA
atggtgagcactctggactc

SEQ ID NO: 59208 - DNA, 25 bp, Homo sapiens
  source 1..25: mol_type = genomic DNA
atttcaacttaacttgaccgctctg

SEQ ID NO: 59209 - DNA, 21 bp, Homo sapiens
  source 1..21: mol_type = genomic DNA
gttaggcctctttttaccacc

SEQ ID NO: 59210 - DNA, 18 bp, Homo sapiens
  source 1..18: mol_type = genomic DNA
ctaggggtatgattctcg

SEQ ID NO: 59211 - DNA, 17 bp, Homo sapiens
  source 1..17: mol_type = genomic DNA
gttcgactcccggtgtg

SEQ ID NO: 59212 - DNA, 20 bp, Homo sapiens
  source 1..20: mol_type = genomic DNA
tcttaatcccagggtcgtgg

SEQ ID NO: 59213 - DNA, 20 bp, Homo sapiens
  source 1..20: mol_type = genomic DNA
aaagacaggggttaggcctc

SEQ ID NO: 59214 - DNA, 35 bp, Homo sapiens; identical to SEQ ID NO: 27659
  source 1..35: mol_type = genomic DNA

SEQ ID NO: 59215 - DNA, 18 bp, Homo sapiens
  source 1..18: mol_type = genomic DNA
tctcttcgggggcgtggg

SEQ ID NO: 59216 - DNA, 37 bp, Homo sapiens; identical to SEQ ID NO: 24955
  source 1..37: mol_type = genomic DNA

SEQ ID NO: 59217 - DNA, 16 bp, Homo sapiens
  source 1..16: mol_type = genomic DNA
atggataaggcactgg

SEQ ID NO: 59218 - DNA, 35 bp, Homo sapiens; identical to SEQ ID NO: 8271
  source 1..35: mol_type = genomic DNA

SEQ ID NO: 59219 - DNA, 21 bp, Homo sapiens
  source 1..21: mol_type = genomic DNA
tggggttttgcagtccttacc

SEQ ID NO: 59220 - DNA, 32 bp, Homo sapiens; identical to SEQ ID NO: 12093
  source 1..32: mol_type = genomic DNA

SEQ ID NO: 59221 - DNA, 24 bp, Homo sapiens
  source 1..24: mol_type = genomic DNA
gtttccgtagtgtagtggtcatca

SEQ ID NO: 59222 - DNA, 17 bp, Homo sapiens
  source 1..17: mol_type = genomic DNA
gtagtcgtggccgagtg

SEQ ID NO: 59223 - DNA, 33 bp, Homo sapiens; identical to SEQ ID NO: 3077
  source 1..33: mol_type = genomic DNA

SEQ ID NO: 59224 - DNA, 30 bp, Homo sapiens; identical to SEQ ID NO: 3839
  source 1..30: mol_type = genomic DNA

SEQ ID NO: 59225 - DNA, 35 bp, Homo sapiens; identical to SEQ ID NO: 8926
  source 1..35: mol_type = genomic DNA

SEQ ID NO: 59226 - DNA, 44 bp, Homo sapiens; identical to SEQ ID NO: 13369
  source 1..44: mol_type = genomic DNA

SEQ ID NO: 59227 - DNA, 41 bp, Homo sapiens; identical to SEQ ID NO: 14374
  source 1..41: mol_type = genomic DNA

SEQ ID NO: 59228 - DNA, 32 bp, Homo sapiens; identical to SEQ ID NO: 17569
  source 1..32: mol_type = genomic DNA

SEQ ID NO: 59229 - DNA, 48 bp, Homo sapiens; identical to SEQ ID NO: 22254
  source 1..48: mol_type = genomic DNA

SEQ ID NO: 59230 - DNA, 25 bp, Homo sapiens
  source 1..25: mol_type = genomic DNA
tggctaggattcggcgctttcaccg

SEQ ID NO: 59231 - DNA, 27 bp, Homo sapiens
  source 1..27: mol_type = genomic DNA
ttcgaagaagcagcttcaaacctgccg

SEQ ID NO: 59232 - DNA, 19 bp, Homo sapiens
  source 1..19: mol_type = genomic DNA
aaagactttttctctgacc

SEQ ID NO: 59233 - DNA, 30 bp, Homo sapiens; identical to SEQ ID NO: 24007
  source 1..30: mol_type = genomic DNA

SEQ ID NO: 59234 - DNA, 17 bp, Homo sapiens
  source 1..17: mol_type = genomic DNA
gtttccgtagtgtagtg

SEQ ID NO: 59235 - DNA, 29 bp, Homo sapiens
  source 1..29: mol_type = genomic DNA
gcccccatgtctaacaacatggctttctc

SEQ ID NO: 59236 - DNA, 23 bp, Homo sapiens
  source 1..23: mol_type = genomic DNA
cgtggttgtagtccgtgcgagaa

SEQ ID NO: 59237 - DNA, 28 bp, Homo sapiens
  source 1..28: mol_type = genomic DNA
gtcgtggttgtagtccgtgcgagaatac

SEQ ID NO: 59238 - DNA, 16 bp, Homo sapiens
  source 1..16: mol_type = genomic DNA
ttcgactcccggtatg

SEQ ID NO: 59239 - DNA, 35 bp, Homo sapiens; identical to SEQ ID NO: 29170
  source 1..35: mol_type = genomic DNA

SEQ ID NO: 59240 - DNA, 26 bp, Homo sapiens
  source 1..26: mol_type = genomic DNA
taagttgcaatacttaatttctgcca

SEQ ID NO: 59241 - DNA, 28 bp, Homo sapiens
  source 1..28: mol_type = genomic DNA
ggatagctcagtcggtagagcatcagac

SEQ ID NO: 59242 - DNA, 34 bp, Homo sapiens; identical to SEQ ID NO: 19282
  source 1..34: mol_type = genomic DNA

SEQ ID NO: 59243 - DNA, 25 bp, Homo sapiens
  source 1..25: mol_type = genomic DNA
aaagtcatggaggccatggggttgg

SEQ ID NO: 59244 - DNA, 27 bp, Homo sapiens
  source 1..27: mol_type = genomic DNA
aagaagcagcttcaaacctgccggggc

SEQ ID NO: 59245 - DNA, 35 bp, Homo sapiens; identical to SEQ ID NO: 22225
  source 1..35: mol_type = genomic DNA

SEQ ID NO: 59246 - DNA, 16 bp, Homo sapiens
  source 1..16: mol_type = genomic DNA
ctcagtcggtagagca

SEQ ID NO: 59247 - DNA, 23 bp, Homo sapiens
  source 1..23: mol_type = genomic DNA
gccacgcgggaggcccgggttcg

SEQ ID NO: 59248 - DNA, 26 bp, Homo sapiens
  source 1..26: mol_type = genomic DNA
cagattgtgaatctgacaacagaggc

SEQ ID NO: 59249 - DNA, 33 bp, Homo sapiens; identical to SEQ ID NO: 29548
  source 1..33: mol_type = genomic DNA

SEQ ID NO: 59250 - DNA, 35 bp, Homo sapiens; identical to SEQ ID NO: 9807
  source 1..35: mol_type = genomic DNA

SEQ ID NO: 59251 - DNA, 19 bp, Homo sapiens
  source 1..19: mol_type = genomic DNA
gattcccgggcggcgcacc

SEQ ID NO: 59252 - DNA, 17 bp, Homo sapiens
  source 1..17: mol_type = genomic DNA
atcacgtcggggtcacc

SEQ ID NO: 59253 - DNA, 17 bp, Homo sapiens
  source 1..17: mol_type = genomic DNA
ttcccgggcggcgcacc

SEQ ID NO: 59254 - DNA, 22 bp, Homo sapiens
  source 1..22: mol_type = genomic DNA
aaagacaggggttaggcctctt

SEQ ID NO: 59255 - DNA, 32 bp, Homo sapiens; identical to SEQ ID NO: 1540
  source 1..32: mol_type = genomic DNA

SEQ ID NO: 59256 - DNA, 31 bp, Homo sapiens; identical to SEQ ID NO: 1853
  source 1..31: mol_type = genomic DNA

SEQ ID NO: 59257 - DNA, 33 bp, Homo sapiens; identical to SEQ ID NO: 2782
  source 1..33: mol_type = genomic DNA

SEQ ID NO: 59258 - DNA, 35 bp, Homo sapiens; identical to SEQ ID NO: 3924
  source 1..35: mol_type = genomic DNA

SEQ ID NO: 59259 - DNA, 24 bp, Homo sapiens
  source 1..24: mol_type = genomic DNA
agcgtgctgggcccataacccaga

SEQ ID NO: 59260 - DNA, 47 bp, Homo sapiens; identical to SEQ ID NO: 8235
  source 1..47: mol_type = genomic DNA

SEQ ID NO: 59261 - DNA, 34 bp, Homo sapiens; identical to SEQ ID NO: 8564
  source 1..34: mol_type = genomic DNA

SEQ ID NO: 59262 - DNA, 24 bp, Homo sapiens
  source 1..24: mol_type = genomic DNA
cagtctcataatctgaaggtcgtg

SEQ ID NO: 59263 - DNA, 32 bp, Homo sapiens; identical to SEQ ID NO: 10481
  source 1..32: mol_type = genomic DNA

SEQ ID NO: 59264 - DNA, 42 bp, Homo sapiens; identical to SEQ ID NO: 10751
  source 1..42: mol_type = genomic DNA

SEQ ID NO: 59265 - DNA, 16 bp, Homo sapiens
  source 1..16: mol_type = genomic DNA
cgattcccggccaacg

SEQ ID NO: 59266 - DNA, 35 bp, Homo sapiens; identical to SEQ ID NO: 13650
  source 1..35: mol_type = genomic DNA

SEQ ID NO: 59267 - DNA, 34 bp, Homo sapiens; identical to SEQ ID NO: 13705
  source 1..34: mol_type = genomic DNA

SEQ ID NO: 59268 - DNA, 29 bp, Homo sapiens
  source 1..29: mol_type = genomic DNA
gctgggcccataacccagaggtcgatgga

SEQ ID NO: 59269 - DNA, 31 bp, Homo sapiens; identical to SEQ ID NO: 18101
  source 1..31: mol_type = genomic DNA

SEQ ID NO: 59270 - DNA, 33 bp, Homo sapiens; identical to SEQ ID NO: 19195
  source 1..33: mol_type = genomic DNA

SEQ ID NO: 59271 - DNA, 33 bp, Homo sapiens; identical to SEQ ID NO: 20408
  source 1..33: mol_type = genomic DNA

SEQ ID NO: 59272 - DNA, 17 bp, Homo sapiens
  source 1..17: mol_type = genomic DNA
gtcaggatggccgagca

SEQ ID NO: 59273 - DNA, 32 bp, Homo sapiens; identical to SEQ ID NO: 21185
  source 1..32: mol_type = genomic DNA

SEQ ID NO: 59274 - DNA, 42 bp, Homo sapiens; identical to SEQ ID NO: 25542
  source 1..42: mol_type = genomic DNA

SEQ ID NO: 59275 - DNA, 30 bp, Homo sapiens; identical to SEQ ID NO: 26320
  source 1..30: mol_type = genomic DNA

SEQ ID NO: 59276 - DNA, 29 bp, Homo sapiens
  source 1..29: mol_type = genomic DNA
tcttaatctcagggtcgtgggttcgagcc

SEQ ID NO: 59277 - DNA, 33 bp, Homo sapiens; identical to SEQ ID NO: 29168
  source 1..33: mol_type = genomic DNA

SEQ ID NO: 59278 - DNA, 19 bp, Homo sapiens
  source 1..19: mol_type = genomic DNA
gacccagtggcctaatgga

SEQ ID NO: 59279 - DNA, 20 bp, Homo sapiens
  source 1..20: mol_type = genomic DNA
gcgccgctggtgtagtggta

SEQ ID NO: 59280 - DNA, 22 bp, Homo sapiens
  source 1..22: mol_type = genomic DNA
tgagtgaagcattggactgtaa

SEQ ID NO: 59281 - DNA, 27 bp, Homo sapiens
  source 1..27: mol_type = genomic DNA
gtggagttaaagactttttctctgacc

SEQ ID NO: 59282 - DNA, 27 bp, Homo sapiens
  source 1..27: mol_type = genomic DNA
aaatggctgagtgaagcattggactgt

SEQ ID NO: 59283 - DNA, 24 bp, Homo sapiens
  source 1..24: mol_type = genomic DNA
ataacagctatccattggtcttag

SEQ ID NO: 59284 - DNA, 32 bp, Homo sapiens; identical to SEQ ID NO: 16804
  source 1..32: mol_type = genomic DNA

SEQ ID NO: 59285 - DNA, 33 bp, Homo sapiens; identical to SEQ ID NO: 25533
  source 1..33: mol_type = genomic DNA

SEQ ID NO: 59286 - DNA, 30 bp, Homo sapiens; identical to SEQ ID NO: 7979
  source 1..30: mol_type = genomic DNA

SEQ ID NO: 59287 - DNA, 36 bp, Homo sapiens; identical to SEQ ID NO: 19548
  source 1..36: mol_type = genomic DNA

SEQ ID NO: 59288 - DNA, 17 bp, Homo sapiens
  source 1..17: mol_type = genomic DNA
tatgattctcggtttgg

SEQ ID NO: 59289 - DNA, 20 bp, Homo sapiens
  source 1..20: mol_type = genomic DNA
cagttggtagagcatcagac

SEQ ID NO: 59290 - DNA, 24 bp, Homo sapiens
  source 1..24: mol_type = genomic DNA
gttcgagcccacccagggacgcca

SEQ ID NO: 59291 - DNA, 19 bp, Homo sapiens
  source 1..19: mol_type = genomic DNA
gatagctcagtcggtagag

SEQ ID NO: 59292 - DNA, 24 bp, Homo sapiens
  source 1..24: mol_type = genomic DNA
agcttaaacccccttatttctacc

SEQ ID NO: 59293 - DNA, 26 bp, Homo sapiens
  source 1..26: mol_type = genomic DNA
aagaactgctaactcatgcccccatg

SEQ ID NO: 59294 - DNA, 29 bp, Homo sapiens
  source 1..29: mol_type = genomic DNA
ttttcatatcattggtcgtggttgtagtc

SEQ ID NO: 59295 - DNA, 16 bp, Homo sapiens
  source 1..16: mol_type = genomic DNA
ttcaaatcccggacga

SEQ ID NO: 59296 - DNA, 17 bp, Homo sapiens
  source 1..17: mol_type = genomic DNA
ggttatcacgtctgctt

SEQ ID NO: 59297 - DNA, 33 bp, Homo sapiens; identical to SEQ ID NO: 18196
  source 1..33: mol_type = genomic DNA

SEQ ID NO: 59298 - DNA, 37 bp, Homo sapiens; identical to SEQ ID NO: 27924
  source 1..37: mol_type = genomic DNA

SEQ ID NO: 59299 - DNA, 29 bp, Homo sapiens
  source 1..29: mol_type = genomic DNA
gaaaaagtcatggaggccatggggttggc

SEQ ID NO: 59300 - DNA, 25 bp, Homo sapiens
  source 1..25: mol_type = genomic DNA
aagcattggactgtaaatctaaaga

SEQ ID NO: 59301 - DNA, 40 bp, Homo sapiens; identical to SEQ ID NO: 1078
  source 1..40: mol_type = genomic DNA

SEQ ID NO: 59302 - DNA, 27 bp, Homo sapiens
  source 1..27: mol_type = genomic DNA
ggtagaattctcgcctgccacgcggga

SEQ ID NO: 59303 - DNA, 24 bp, Homo sapiens
  source 1..24: mol_type = genomic DNA
ggttcaattcctcttcttaacacc

SEQ ID NO: 59304 - DNA, 36 bp, Homo sapiens; identical to SEQ ID NO: 23714
  source 1..36: mol_type = genomic DNA

SEQ ID NO: 59305 - DNA, 25 bp, Homo sapiens
  source 1..25: mol_type = genomic DNA
cagaccaagagccttcaaagccctc

SEQ ID NO: 59306 - DNA, 29 bp, Homo sapiens
  source 1..29: mol_type = genomic DNA
cagtcggtagagcatgggactcttaatcc

SEQ ID NO: 59307 - DNA, 34 bp, Homo sapiens; identical to SEQ ID NO: 18264
  source 1..34: mol_type = genomic DNA

SEQ ID NO: 59308 - DNA, 34 bp, Homo sapiens; identical to SEQ ID NO: 29575
  source 1..34: mol_type = genomic DNA

SEQ ID NO: 59309 - DNA, 17 bp, Homo sapiens
  source 1..17: mol_type = genomic DNA
aaaagagttactttgat

SEQ ID NO: 59310 - DNA, 16 bp, Homo sapiens
  source 1..16: mol_type = genomic DNA
aacccccttatttcta

SEQ ID NO: 59311 - DNA, 30 bp, Homo sapiens; identical to SEQ ID NO: 3304
  source 1..30: mol_type = genomic DNA

SEQ ID NO: 59312 - DNA, 33 bp, Homo sapiens; identical to SEQ ID NO: 13751
  source 1..33: mol_type = genomic DNA

SEQ ID NO: 59313 - DNA, 29 bp, Homo sapiens
  source 1..29: mol_type = genomic DNA
ctcctcgttagtatagtggtgagtatccc

SEQ ID NO: 59314 - DNA, 30 bp, Homo sapiens; identical to SEQ ID NO: 16867
  source 1..30: mol_type = genomic DNA

SEQ ID NO: 59315 - DNA, 36 bp, Homo sapiens; identical to SEQ ID NO: 17283
  source 1..36: mol_type = genomic DNA

SEQ ID NO: 59316 - DNA, 37 bp, Homo sapiens; identical to SEQ ID NO: 20631
  source 1..37: mol_type = genomic DNA

SEQ ID NO: 59317 - DNA, 46 bp, Homo sapiens; identical to SEQ ID NO: 23097
  source 1..46: mol_type = genomic DNA

SEQ ID NO: 59318 - DNA, 25 bp, Homo sapiens
  source 1..25: mol_type = genomic DNA
tagaattctcgcctgccacgcggga

SEQ ID NO: 59319 - DNA, 30 bp, Homo sapiens; identical to SEQ ID NO: 25109
  source 1..30: mol_type = genomic DNA

SEQ ID NO: 59320 - DNA, 21 bp, Homo sapiens
  source 1..21: mol_type = genomic DNA
tctcataatctgaaggtcgtg

SEQ ID NO: 59321 - DNA, 34 bp, Homo sapiens; identical to SEQ ID NO: 29843
  source 1..34: mol_type = genomic DNA

SEQ ID NO: 59322 - DNA, 32 bp, Homo sapiens; identical to SEQ ID NO: 30922
  source 1..32: mol_type = genomic DNA

SEQ ID NO: 59323 - DNA, 23 bp, Homo sapiens
  source 1..23: mol_type = genomic DNA
ggtagcgtggccgagcggtctaa

SEQ ID NO: 59324 - DNA, 18 bp, Homo sapiens
  source 1..18: mol_type = genomic DNA
atcacgtcggggtcacca

SEQ ID NO: 59325 - DNA, 30 bp, Homo sapiens; identical to SEQ ID NO: 10862
  source 1..30: mol_type = genomic DNA

SEQ ID NO: 59326 - DNA, 25 bp, Homo sapiens
  source 1..25: mol_type = genomic DNA
gatttcaacttaacttgaccgctct

SEQ ID NO: 59327 - DNA, 26 bp, Homo sapiens
  source 1..26: mol_type = genomic DNA
gtttccgtagtgtagtggtcatcacg

SEQ ID NO: 59328 - DNA, 27 bp, Homo sapiens
  source 1..27: mol_type = genomic DNA
aaacatcagattgtgaatctgacaaca

SEQ ID NO: 59329 - DNA, 21 bp, Homo sapiens
  source 1..21: mol_type = genomic DNA
gttcgattcccggtcagggaa

SEQ ID NO: 59330 - DNA, 16 bp, Homo sapiens
  source 1..16: mol_type = genomic DNA
cccgggtttcggcacc

SEQ ID NO: 59331 - DNA, 21 bp, Homo sapiens
  source 1..21: mol_type = genomic DNA
tcgaatccggctcgaaggacc

SEQ ID NO: 59332 - DNA, 30 bp, Homo sapiens; identical to SEQ ID NO: 2232
  source 1..30: mol_type = genomic DNA

SEQ ID NO: 59333 - DNA, 32 bp, Homo sapiens; identical to SEQ ID NO: 16849
  source 1..32: mol_type = genomic DNA

SEQ ID NO: 59334 - DNA, 20 bp, Homo sapiens
  source 1..20: mol_type = genomic DNA
gcgttggtggtatagtggta

SEQ ID NO: 59335 - DNA, 21 bp, Homo sapiens
  source 1..21: mol_type = genomic DNA
ttaaacccccttatttctacc

SEQ ID NO: 59336 - DNA, 36 bp, Homo sapiens; identical to SEQ ID NO: 10674
  source 1..36: mol_type = genomic DNA

SEQ ID NO: 59337 - DNA, 16 bp, Homo sapiens
  source 1..16: mol_type = genomic DNA
aagattaagagaacca

SEQ ID NO: 59338 - DNA, 28 bp, Homo sapiens
  source 1..28: mol_type = genomic DNA
ccatggtgtaatggttagcactctggac

SEQ ID NO: 59339 - DNA, 30 bp, Homo sapiens; identical to SEQ ID NO: 2272
  source 1..30: mol_type = genomic DNA

SEQ ID NO: 59340 - DNA, 20 bp, Homo sapiens
  source 1..20: mol_type = genomic DNA
gtggttatcacgtctgcttt

SEQ ID NO: 59341 - DNA, 29 bp, Homo sapiens
  source 1..29: mol_type = genomic DNA
ttgtgggtttaagtcccattggtctagcc

SEQ ID NO: 59342 - DNA, 27 bp, Homo sapiens
  source 1..27: mol_type = genomic DNA
catggtgtaatggttagcactctggac

SEQ ID NO: 59343 - DNA, 30 bp, Homo sapiens; identical to SEQ ID NO: 8183
  source 1..30: mol_type = genomic DNA

SEQ ID NO: 59344 - DNA, 34 bp, Homo sapiens; identical to SEQ ID NO: 16641
  source 1..34: mol_type = genomic DNA

SEQ ID NO: 59345 - DNA, 33 bp, Homo sapiens; identical to SEQ ID NO: 19364
  source 1..33: mol_type = genomic DNA

SEQ ID NO: 59346 - DNA, 24 bp, Homo sapiens
  source 1..24: mol_type = genomic DNA
tgtctaacaacatggctttctcac

SEQ ID NO: 59347 - DNA, 46 bp, Homo sapiens; identical to SEQ ID NO: 9934
  source 1..46: mol_type = genomic DNA

SEQ ID NO: 59348 - DNA, 26 bp, Homo sapiens
  source 1..26: mol_type = genomic DNA
cgctctcaccgccgcggcccgggttc

SEQ ID NO: 59349 - DNA, 24 bp, Homo sapiens
  source 1..24: mol_type = genomic DNA
tagtggttagtatccccgcctgtc

SEQ ID NO: 59350 - DNA, 22 bp, Homo sapiens
  source 1..22: mol_type = genomic DNA
cccattcttgcgacccgggttc

SEQ ID NO: 59351 - DNA, 32 bp, Homo sapiens; identical to SEQ ID NO: 18195
  source 1..32: mol_type = genomic DNA

SEQ ID NO: 59352 - DNA, 17 bp, Homo sapiens
  source 1..17: mol_type = genomic DNA
atcctatatatcttacc

SEQ ID NO: 59353 - DNA, 38 bp, Homo sapiens; identical to SEQ ID NO: 1011
  source 1..38: mol_type = genomic DNA

SEQ ID NO: 59354 - DNA, 23 bp, Homo sapiens
  source 1..23: mol_type = genomic DNA
gttcgagtcccatctgggtcgcc

SEQ ID NO: 59355 - DNA, 34 bp, Homo sapiens; identical to SEQ ID NO: 4152
  source 1..34: mol_type = genomic DNA

SEQ ID NO: 59356 - DNA, 29 bp, Homo sapiens
  source 1..29: mol_type = genomic DNA
tgcgacccgggttcgattcccgggcggcg

SEQ ID NO: 59357 - DNA, 21 bp, Homo sapiens
  source 1..21: mol_type = genomic DNA
aaacctttttccaaggacacc

SEQ ID NO: 59358 - DNA, 16 bp, Homo sapiens
  source 1..16: mol_type = genomic DNA
ctaggggtatgattct

SEQ ID NO: 59359 - DNA, 27 bp, Homo sapiens
  source 1..27: mol_type = genomic DNA
gcccccatgtctaacaacatggctttc

SEQ ID NO: 59360 - DNA, 18 bp, Homo sapiens
  source 1..18: mol_type = genomic DNA
tgtagtgtagtggttatc

SEQ ID NO: 59361 - DNA, 34 bp, Homo sapiens; identical to SEQ ID NO: 8270
  source 1..34: mol_type = genomic DNA

SEQ ID NO: 59362 - DNA, 16 bp, Homo sapiens
  source 1..16: mol_type = genomic DNA
cgatccccagtacctc

SEQ ID NO: 59363 - DNA, 37 bp, Homo sapiens; identical to SEQ ID NO: 21653
  source 1..37: mol_type = genomic DNA

SEQ ID NO: 59364 - DNA, 25 bp, Homo sapiens
  source 1..25: mol_type = genomic DNA
taagttgcaatacttaatttctgcc

SEQ ID NO: 59365 - DNA, 28 bp, Homo sapiens
  source 1..28: mol_type = genomic DNA
taggagcttaaacccccttatttctacc

SEQ ID NO: 59366 - DNA, 27 bp, Homo sapiens
  source 1..27: mol_type = genomic DNA
tctcgcctgccacgcgggaggcccggg

SEQ ID NO: 59367 - DNA, 17 bp, Homo sapiens
  source 1..17: mol_type = genomic DNA
ccccagcatctccacca

SEQ ID NO: 59368 - DNA, 17 bp, Homo sapiens
  source 1..17: mol_type = genomic DNA
gagtatccccgcctgtc

SEQ ID NO: 59369 - DNA, 18 bp, Homo sapiens
  source 1..18: mol_type = genomic DNA
ctgttaactaagtgtttg

SEQ ID NO: 59370 - DNA, 22 bp, Homo sapiens
  source 1..22: mol_type = genomic DNA
ggggatgtagctcagtggtaga

SEQ ID NO: 59371 - DNA, 37 bp, Homo sapiens; identical to SEQ ID NO: 420
  source 1..37: mol_type = genomic DNA

SEQ ID NO: 59372 - DNA, 32 bp, Homo sapiens; identical to SEQ ID NO: 836
  source 1..32: mol_type = genomic DNA

SEQ ID NO: 59373 - DNA, 27 bp, Homo sapiens
  source 1..27: mol_type = genomic DNA
aagagaaccaacacctctttacagtga

SEQ ID NO: 59374 - DNA, 26 bp, Homo sapiens
  source 1..26: mol_type = genomic DNA
aaggctgcgtgttcgaatcacgtcgg

SEQ ID NO: 59375 - DNA, 47 bp, Homo sapiens; identical to SEQ ID NO: 3056
  source 1..47: mol_type = genomic DNA

SEQ ID NO: 59376 - DNA, 35 bp, Homo sapiens; identical to SEQ ID NO: 7424
  source 1..35: mol_type = genomic DNA

SEQ ID NO: 59377 - DNA, 20 bp, Homo sapiens
  source 1..20: mol_type = genomic DNA
caattcctcttcttaacacc

SEQ ID NO: 59378 - DNA, 45 bp, Homo sapiens; identical to SEQ ID NO: 8798
  source 1..45: mol_type = genomic DNA

SEQ ID NO: 59379 - DNA, 34 bp, Homo sapiens; identical to SEQ ID NO: 10908
  source 1..34: mol_type = genomic DNA

SEQ ID NO: 59380 - DNA, 27 bp, Homo sapiens
  source 1..27: mol_type = genomic DNA
cctcgttagtatagtggttagtatccc

SEQ ID NO: 59381 - DNA, 17 bp, Homo sapiens
  source 1..17: mol_type = genomic DNA
cgcgggttcgaaccccg

SEQ ID NO: 59382 - DNA, 17 bp, Homo sapiens
  source 1..17: mol_type = genomic DNA
cgcgggttcgatccccg

SEQ ID NO: 59383 - DNA, 34 bp, Homo sapiens; identical to SEQ ID NO: 14368
  source 1..34: mol_type = genomic DNA

SEQ ID NO: 59384 - DNA, 48 bp, Homo sapiens; identical to SEQ ID NO: 14547
  source 1..48: mol_type = genomic DNA

SEQ ID NO: 59385 - DNA, 31 bp, Homo sapiens; identical to SEQ ID NO: 14878
  source 1..31: mol_type = genomic DNA

SEQ ID NO: 59386 - DNA, 42 bp, Homo sapiens; identical to SEQ ID NO: 16485
  source 1..42: mol_type = genomic DNA

SEQ ID NO: 59387 - DNA, 32 bp, Homo sapiens; identical to SEQ ID NO: 16529
  source 1..32: mol_type = genomic DNA

SEQ ID NO: 59388 - DNA, 39 bp, Homo sapiens; identical to SEQ ID NO: 17118
  source 1..39: mol_type = genomic DNA

SEQ ID NO: 59389 - DNA, 45 bp, Homo sapiens; identical to SEQ ID NO: 20165
  source 1..45: mol_type = genomic DNA

SEQ ID NO: 59390 - DNA, 30 bp, Homo sapiens; identical to SEQ ID NO: 23107
  source 1..30: mol_type = genomic DNA

SEQ ID NO: 59391 - DNA, 48 bp, Homo sapiens; identical to SEQ ID NO: 23495
  source 1..48: mol_type = genomic DNA

SEQ ID NO: 59392 - DNA, 34 bp, Homo sapiens; identical to SEQ ID NO: 24592
  source 1..34: mol_type = genomic DNA

SEQ ID NO: 59393 - DNA, 24 bp, Homo sapiens
  source 1..24: mol_type = genomic DNA
tccgaggtgattttcatattgaat

SEQ ID NO: 59394 - DNA, 34 bp, Homo sapiens; identical to SEQ ID NO: 27197
  source 1..34: mol_type = genomic DNA

SEQ ID NO: 59395 - DNA, 24 bp, Homo sapiens
  source 1..24: mol_type = genomic DNA
ttgacccgggttcgattcccggcc

SEQ ID NO: 59396 - DNA, 39 bp, Homo sapiens; identical to SEQ ID NO: 30353
  source 1..39: mol_type = genomic DNA

SEQ ID NO: 59397 - DNA, 20 bp, Homo sapiens
  source 1..20: mol_type = genomic DNA
gttaaagactttttctctga

SEQ ID NO: 59398 - DNA, 21 bp, Homo sapiens
  source 1..21: mol_type = genomic DNA
gtggttgtagtccgtgcgaga

SEQ ID NO: 59399 - DNA, 19 bp, Homo sapiens
  source 1..19: mol_type = genomic DNA
atcattggtcgtggttgta

SEQ ID NO: 59400 - DNA, 18 bp, Homo sapiens
  source 1..18: mol_type = genomic DNA
tcgtggttgtagtccgtg

SEQ ID NO: 59401 - DNA, 33 bp, Homo sapiens; identical to SEQ ID NO: 6211
  source 1..33: mol_type = genomic DNA

SEQ ID NO: 59402 - DNA, 21 bp, Homo sapiens
  source 1..21: mol_type = genomic DNA
agtgaagcattggactgtaaa

SEQ ID NO: 59403 - DNA, 23 bp, Homo sapiens
  source 1..23: mol_type = genomic DNA
gttcgattctcatagtcctagcc

SEQ ID NO: 59404 - DNA, 21 bp, Homo sapiens
  source 1..21: mol_type = genomic DNA
caacattcaaaaaagagtacc

SEQ ID NO: 59405 - DNA, 27 bp, Homo sapiens
  source 1..27: mol_type = genomic DNA
gcaatggtggttcagtggtagaattct

SEQ ID NO: 59406 - DNA, 16 bp, Homo sapiens
  source 1..16: mol_type = genomic DNA
tcattggtcgtggttg

SEQ ID NO: 59407 - DNA, 21 bp, Homo sapiens
  source 1..21: mol_type = genomic DNA
gttatacccttcccgtactac

SEQ ID NO: 59408 - DNA, 26 bp, Homo sapiens
  source 1..26: mol_type = genomic DNA
tggtctagcggttaggattcctggtt

SEQ ID NO: 59409 - DNA, 30 bp, Homo sapiens; identical to SEQ ID NO: 25843
  source 1..30: mol_type = genomic DNA

SEQ ID NO: 59410 - DNA, 27 bp, Homo sapiens
  source 1..27: mol_type = genomic DNA
tccctggtggtctagtggctaggattc

SEQ ID NO: 59411 - DNA, 23 bp, Homo sapiens
  source 1..23: mol_type = genomic DNA
tagtactctgcgttgtggccgca

SEQ ID NO: 59412 - DNA, 18 bp, Homo sapiens
  source 1..18: mol_type = genomic DNA
aggcctctttttaccacc

SEQ ID NO: 59413 - DNA, 21 bp, Homo sapiens
  source 1..21: mol_type = genomic DNA
atagtggtgagtatccccgcc

SEQ ID NO: 59414 - DNA, 35 bp, Homo sapiens; identical to SEQ ID NO: 18284
  source 1..35: mol_type = genomic DNA

SEQ ID NO: 59415 - DNA, 18 bp, Homo sapiens
  source 1..18: mol_type = genomic DNA
cctcctcaaagcaataca

SEQ ID NO: 59416 - DNA, 21 bp, Homo sapiens
  source 1..21: mol_type = genomic DNA
aatggtggagttaaagacttt

SEQ ID NO: 59417 - DNA, 22 bp, Homo sapiens
  source 1..22: mol_type = genomic DNA
gagcttaaacccccttatttct

SEQ ID NO: 59418 - DNA, 35 bp, Homo sapiens; identical to SEQ ID NO: 24012
  source 1..35: mol_type = genomic DNA

SEQ ID NO: 59419 - DNA, 41 bp, Homo sapiens; identical to SEQ ID NO: 23372
  source 1..41: mol_type = genomic DNA

SEQ ID NO: 59420 - DNA, 25 bp, Homo sapiens
  source 1..25: mol_type = genomic DNA
ggtagaattctcgcctgccacgcgg

SEQ ID NO: 59421 - DNA, 22 bp, Homo sapiens
  source 1..22: mol_type = genomic DNA
ttcgagtctcggtggaacctcc

SEQ ID NO: 59422 - DNA, 17 bp, Homo sapiens
  source 1..17: mol_type = genomic DNA
acacgcagaaggtcctg

SEQ ID NO: 59423 - DNA, 29 bp, Homo sapiens
  source 1..29: mol_type = genomic DNA
cccgggttcaatccccggcacctccacca

SEQ ID NO: 59424 - DNA, 21 bp, Homo sapiens
  source 1..21: mol_type = genomic DNA
ctcagggatgggttcgattct

SEQ ID NO: 59425 - DNA, 34 bp, Homo sapiens; identical to SEQ ID NO: 24475
  source 1..34: mol_type = genomic DNA

SEQ ID NO: 59426 - DNA, 19 bp, Homo sapiens
  source 1..19: mol_type = genomic DNA
ctcataatctgaaggtcct

SEQ ID NO: 59427 - DNA, 35 bp, Homo sapiens; identical to SEQ ID NO: 27922
  source 1..35: mol_type = genomic DNA

SEQ ID NO: 59428 - DNA, 26 bp, Homo sapiens
  source 1..26: mol_type = genomic DNA
aattatgataatcatatttaccaacc

SEQ ID NO: 59429 - DNA, 20 bp, Homo sapiens
  source 1..20: mol_type = genomic DNA
gtggttatcacatctgcttt

SEQ ID NO: 59430 - DNA, 18 bp, Homo sapiens
  source 1..18: mol_type = genomic DNA
agattgagggttcgagtc

SEQ ID NO: 59431 - DNA, 26 bp, Homo sapiens
  source 1..26: mol_type = genomic DNA
aggcggcccgggttcgactcccggtg

SEQ ID NO: 59432 - DNA, 20 bp, Homo sapiens
  source 1..20: mol_type = genomic DNA
agtggttatcacgtctgctt

SEQ ID NO: 59433 - DNA, 33 bp, Homo sapiens; identical to SEQ ID NO: 11630
  source 1..33: mol_type = genomic DNA

SEQ ID NO: 59434 - DNA, 16 bp, Homo sapiens
  source 1..16: mol_type = genomic DNA
ttcgatccccggcatc

SEQ ID NO: 59435 - DNA, 25 bp, Homo sapiens
  source 1..25: mol_type = genomic DNA
ttgacaacattcaaaaaagagtacc

SEQ ID NO: 59436 - DNA, 20 bp, Homo sapiens
  source 1..20: mol_type = genomic DNA
gcattggtggttcagtggta

SEQ ID NO: 59437 - DNA, 19 bp, Homo sapiens
  source 1..19: mol_type = genomic DNA
gttcgattcccggccaacg

SEQ ID NO: 59438 - DNA, 45 bp, Homo sapiens; identical to SEQ ID NO: 57
  source 1..45: mol_type = genomic DNA

SEQ ID NO: 59439 - DNA, 32 bp, Homo sapiens; identical to SEQ ID NO: 415
  source 1..32: mol_type = genomic DNA

SEQ ID NO: 59440 - DNA, 37 bp, Homo sapiens; identical to SEQ ID NO: 2889
  source 1..37: mol_type = genomic DNA

SEQ ID NO: 59441 - DNA, 31 bp, Homo sapiens; identical to SEQ ID NO: 2978
  source 1..31: mol_type = genomic DNA

SEQ ID NO: 59442 - DNA, 28 bp, Homo sapiens
  source 1..28: mol_type = genomic DNA
agaaatatgtctgataaaagagttactt

SEQ ID NO: 59443 - DNA, 32 bp, Homo sapiens; identical to SEQ ID NO: 6370
  source 1..32: mol_type = genomic DNA

SEQ ID NO: 59444 - DNA, 28 bp, Homo sapiens
  source 1..28: mol_type = genomic DNA
atgggttcgattctcatagtcctagcca

SEQ ID NO: 59445 - DNA, 16 bp, Homo sapiens
  source 1..16: mol_type = genomic DNA
cacgcgggagaccggg

SEQ ID NO: 59446 - DNA, 48 bp, Homo sapiens; identical to SEQ ID NO: 8654
  source 1..48: mol_type = genomic DNA

SEQ ID NO: 59447 - DNA, 38 bp, Homo sapiens; identical to SEQ ID NO: 8791
  source 1..38: mol_type = genomic DNA

SEQ ID NO: 59448 - DNA, 33 bp, Homo sapiens; identical to SEQ ID NO: 9500
  source 1..33: mol_type = genomic DNA

SEQ ID NO: 59449 - DNA, 34 bp, Homo sapiens; identical to SEQ ID NO: 9708
  source 1..34: mol_type = genomic DNA

SEQ ID NO: 59450 - DNA, 26 bp, Homo sapiens
  source 1..26: mol_type = genomic DNA
ccagggttcaagtccctgttcaggcg

SEQ ID NO: 59451 - DNA, 27 bp, Homo sapiens
  source 1..27: mol_type = genomic DNA
ctaaataagctatcgggcccatacccc

SEQ ID NO: 59452 - DNA, 36 bp, Homo sapiens; identical to SEQ ID NO: 13155
  source 1..36: mol_type = genomic DNA

SEQ ID NO: 59453 - DNA, 27 bp, Homo sapiens
  source 1..27: mol_type = genomic DNA
cttacctcctcaaagcaatacactgaa

SEQ ID NO: 59454 - DNA, 37 bp, Homo sapiens; identical to SEQ ID NO: 14563
  source 1..37: mol_type = genomic DNA

SEQ ID NO: 59455 - DNA, 44 bp, Homo sapiens; identical to SEQ ID NO: 15269
  source 1..44: mol_type = genomic DNA

SEQ ID NO: 59456 - DNA, 31 bp, Homo sapiens; identical to SEQ ID NO: 15332
  source 1..31: mol_type = genomic DNA

SEQ ID NO: 59457 - DNA, 25 bp, Homo sapiens
  source 1..25: mol_type = genomic DNA
gagttcaaatctcgctggggcctcc

SEQ ID NO: 59458 - DNA, 25 bp, Homo sapiens
  source 1..25: mol_type = genomic DNA
gctaaataagctatcgggcccatac

SEQ ID NO: 59459 - DNA, 32 bp, Homo sapiens; identical to SEQ ID NO: 17641
  source 1..32: mol_type = genomic DNA

SEQ ID NO: 59460 - DNA, 32 bp, Homo sapiens; identical to SEQ ID NO: 18677
  source 1..32: mol_type = genomic DNA

SEQ ID NO: 59461 - DNA, 38 bp, Homo sapiens; identical to SEQ ID NO: 19223
  source 1..38: mol_type = genomic DNA

SEQ ID NO: 59462 - DNA, 30 bp, Homo sapiens; identical to SEQ ID NO: 22648
  source 1..30: mol_type = genomic DNA

SEQ ID NO: 59463 - DNA, 39 bp, Homo sapiens; identical to SEQ ID NO: 25164
  source 1..39: mol_type = genomic DNA

SEQ ID NO: 59464 - DNA, 16 bp, Homo sapiens
  source 1..16: mol_type = genomic DNA
tccctgttcaggcgcc

SEQ ID NO: 59465 - DNA, 36 bp, Homo sapiens; identical to SEQ ID NO: 26428
  source 1..36: mol_type = genomic DNA

SEQ ID NO: 59466 - DNA, 35 bp, Homo sapiens; identical to SEQ ID NO: 28871
  source 1..35: mol_type = genomic DNA

SEQ ID NO: 59467 - DNA, 39 bp, Homo sapiens; identical to SEQ ID NO: 30468
  source 1..39: mol_type = genomic DNA

SEQ ID NO: 59468 - DNA, 23 bp, Homo sapiens
  source 1..23: mol_type = genomic DNA
agttaaagactttttctctgacc

SEQ ID NO: 59469 - DNA, 24 bp, Homo sapiens
  source 1..24: mol_type = genomic DNA
gttgtagtccgtgcgagaatacca

SEQ ID NO: 59470 - DNA, 30 bp, Homo sapiens; identical to SEQ ID NO: 6208
  source 1..30: mol_type = genomic DNA

SEQ ID NO: 59471 - DNA, 26 bp, Homo sapiens
  source 1..26: mol_type = genomic DNA
tttcaacttaacttgaccgctctgac

SEQ ID NO: 59472 - DNA, 28 bp, Homo sapiens
  source 1..28: mol_type = genomic DNA
gatttcaacttaacttgaccgctctgac

SEQ ID NO: 59473 - DNA, 29 bp, Homo sapiens
  source 1..29: mol_type = genomic DNA
taaaatggctgagtgaagcattggactgt

SEQ ID NO: 59474 - DNA, 23 bp, Homo sapiens
  source 1..23: mol_type = genomic DNA
ggttagcactctggactctgaat

SEQ ID NO: 59475 - DNA, 18 bp, Homo sapiens
  source 1..18: mol_type = genomic DNA
cagattgtgaatctgaca

SEQ ID NO: 59476 - DNA, 20 bp, Homo sapiens
  source 1..20: mol_type = genomic DNA
ggtaaaatggctgagtgaag

SEQ ID NO: 59477 - DNA, 22 bp, Homo sapiens
  source 1..22: mol_type = genomic DNA
gcgttggtggtatagtggttag

SEQ ID NO: 59478 - DNA, 28 bp, Homo sapiens
  source 1..28: mol_type = genomic DNA
tcgtggttgtagtccgtgcgagaatacc

SEQ ID NO: 59479 - DNA, 21 bp, Homo sapiens
  source 1..21: mol_type = genomic DNA
atagtggttagtactctgcgt

SEQ ID NO: 59480 - DNA, 26 bp, Homo sapiens
  source 1..26: mol_type = genomic DNA
gagatttcaacttaacttgaccgctc

SEQ ID NO: 59481 - DNA, 21 bp, Homo sapiens
  source 1..21: mol_type = genomic DNA
ttatacccttcccgtactacc

SEQ ID NO: 59482 - DNA, 21 bp, Homo sapiens
  source 1..21: mol_type = genomic DNA
gggggtatagctcagtggtag

SEQ ID NO: 59483 - DNA, 19 bp, Homo sapiens
  source 1..19: mol_type = genomic DNA
aattaactagttttgacaa

SEQ ID NO: 59484 - DNA, 36 bp, Homo sapiens; identical to SEQ ID NO: 6410
  source 1..36: mol_type = genomic DNA

SEQ ID NO: 59485 - DNA, 33 bp, Homo sapiens; identical to SEQ ID NO: 19757
  source 1..33: mol_type = genomic DNA

SEQ ID NO: 59486 - DNA, 31 bp, Homo sapiens; identical to SEQ ID NO: 24472
  source 1..31: mol_type = genomic DNA

SEQ ID NO: 59487 - DNA, 24 bp, Homo sapiens
  source 1..24: mol_type = genomic DNA
gttcgattccttccttttttgcca

SEQ ID NO: 59488 - DNA, 25 bp, Homo sapiens
  source 1..25: mol_type = genomic DNA
gtagcgtggccgagcggtctaaggc

SEQ ID NO: 59489 - DNA, 16 bp, Homo sapiens
  source 1..16: mol_type = genomic DNA
tccctgtggtctagtg

SEQ ID NO: 59490 - DNA, 24 bp, Homo sapiens
  source 1..24: mol_type = genomic DNA
gtttatgtagcttacctcctcaaa

SEQ ID NO: 59491 - DNA, 27 bp, Homo sapiens
  source 1..27: mol_type = genomic DNA
tcgtggttgtagtccgtgcgagaatac

SEQ ID NO: 59492 - DNA, 36 bp, Homo sapiens; identical to SEQ ID NO: 30465
  source 1..36: mol_type = genomic DNA

SEQ ID NO: 59493 - DNA, 20 bp, Homo sapiens
  source 1..20: mol_type = genomic DNA
ttcaaacctgccggggcttc

SEQ ID NO: 59494 - DNA, 28 bp, Homo sapiens
  source 1..28: mol_type = genomic DNA
tgtgggtttaagtcccattggtctagcc

SEQ ID NO: 59495 - DNA, 23 bp, Homo sapiens
  source 1..23: mol_type = genomic DNA
gctcagtcggtagagcatcagac

SEQ ID NO: 59496 - DNA, 18 bp, Homo sapiens
  source 1..18: mol_type = genomic DNA
gctatccattggtcttag

SEQ ID NO: 59497 - DNA, 47 bp, Homo sapiens; identical to SEQ ID NO: 9935
  source 1..47: mol_type = genomic DNA

SEQ ID NO: 59498 - DNA, 17 bp, Homo sapiens
  source 1..17: mol_type = genomic DNA
acccttcccgtactacc

SEQ ID NO: 59499 - DNA, 25 bp, Homo sapiens
  source 1..25: mol_type = genomic DNA
aaccaaaacatcagattgtgaatct

SEQ ID NO: 59500 - DNA, 30 bp, Homo sapiens; identical to SEQ ID NO: 23652
  source 1..30: mol_type = genomic DNA

SEQ ID NO: 59501 - DNA, 41 bp, Homo sapiens; identical to SEQ ID NO: 25334
  source 1..41: mol_type = genomic DNA

SEQ ID NO: 59502 - DNA, 26 bp, Homo sapiens
  source 1..26: mol_type = genomic DNA
aagctcacaagaactgctaactcatg

SEQ ID NO: 59503 - DNA, 23 bp, Homo sapiens
  source 1..23: mol_type = genomic DNA
catcagattgtgaatctgacaac

SEQ ID NO: 59504 - DNA, 16 bp, Homo sapiens
  source 1..16: mol_type = genomic DNA
gttatcacgtctgctt

SEQ ID NO: 59505 - DNA, 22 bp, Homo sapiens
  source 1..22: mol_type = genomic DNA
cggcccgggttcgattcccggt

SEQ ID NO: 59506 - DNA, 33 bp, Homo sapiens; identical to SEQ ID NO: 16770
  source 1..33: mol_type = genomic DNA

SEQ ID NO: 59507 - DNA, 20 bp, Homo sapiens
  source 1..20: mol_type = genomic DNA
ggttcgagtcccggcggagt

SEQ ID NO: 59508 - DNA, 46 bp, Homo sapiens; identical to SEQ ID NO: 17029
  source 1..46: mol_type = genomic DNA

SEQ ID NO: 59509 - DNA, 36 bp, Homo sapiens; identical to SEQ ID NO: 8576
  source 1..36: mol_type = genomic DNA

SEQ ID NO: 59510 - DNA, 27 bp, Homo sapiens
  source 1..27: mol_type = genomic DNA
gtagaattctcgcctgccacgcgggag

SEQ ID NO: 59511 - DNA, 27 bp, Homo sapiens
  source 1..27: mol_type = genomic DNA
agatgaaaacctttttccaaggacacc

SEQ ID NO: 59512 - DNA, 28 bp, Homo sapiens
  source 1..28: mol_type = genomic DNA
aggagcttaaacccccttatttctacca

SEQ ID NO: 59513 - DNA, 25 bp, Homo sapiens
  source 1..25: mol_type = genomic DNA
atggggtgtgataggtggcacggag

SEQ ID NO: 59514 - DNA, 22 bp, Homo sapiens
  source 1..22: mol_type = genomic DNA
cagcttcaaacctgccggggct

SEQ ID NO: 59515 - DNA, 34 bp, Homo sapiens; identical to SEQ ID NO: 10156
  source 1..34: mol_type = genomic DNA

SEQ ID NO: 59516 - DNA, 16 bp, Homo sapiens
  source 1..16: mol_type = genomic DNA
cttaatcccagggtcg

SEQ ID NO: 59517 - DNA, 37 bp, Homo sapiens; identical to SEQ ID NO: 19549
  source 1..37: mol_type = genomic DNA

SEQ ID NO: 59518 - DNA, 22 bp, Homo sapiens
  source 1..22: mol_type = genomic DNA
ttcgaagaagcagcttcaaacc

SEQ ID NO: 59519 - DNA, 43 bp, Homo sapiens; identical to SEQ ID NO: 217
  source 1..43: mol_type = genomic DNA

SEQ ID NO: 59520 - DNA, 27 bp, Homo sapiens
  source 1..27: mol_type = genomic DNA
gatggggtgtgataggtggcacggaga

SEQ ID NO: 59521 - DNA, 27 bp, Homo sapiens
  source 1..27: mol_type = genomic DNA
taacacaaagcacccaacttacactta

SEQ ID NO: 59522 - DNA, 24 bp, Homo sapiens
  source 1..24: mol_type = genomic DNA
tctgacaacagaggcttacgaccc

SEQ ID NO: 59523 - DNA, 34 bp, Homo sapiens; identical to SEQ ID NO: 27921
  source 1..34: mol_type = genomic DNA

SEQ ID NO: 59524 - DNA, 18 bp, Homo sapiens
  source 1..18: mol_type = genomic DNA
ctcccggtgtgggaacca

SEQ ID NO: 59525 - DNA, 20 bp, Homo sapiens
  source 1..20: mol_type = genomic DNA
accaggatggccgagtggtt

SEQ ID NO: 59526 - DNA, 21 bp, Homo sapiens
  source 1..21: mol_type = genomic DNA
agagtaaataataggagctta

SEQ ID NO: 59527 - DNA, 23 bp, Homo sapiens
  source 1..23: mol_type = genomic DNA
aaaaaccatttcataactttgtc

SEQ ID NO: 59528 - DNA, 34 bp, Homo sapiens; identical to SEQ ID NO: 771
  source 1..34: mol_type = genomic DNA

SEQ ID NO: 59529 - DNA, 16 bp, Homo sapiens
  source 1..16: mol_type = genomic DNA
aatcccaccgctgcca

SEQ ID NO: 59530 - DNA, 33 bp, Homo sapiens; identical to SEQ ID NO: 3238
  source 1..33: mol_type = genomic DNA

SEQ ID NO: 59531 - DNA, 26 bp, Homo sapiens
  source 1..26: mol_type = genomic DNA
agaggcttacgaccccttatttaccc

SEQ ID NO: 59532 - DNA, 24 bp, Homo sapiens
  source 1..24: mol_type = genomic DNA
agattaagagaaccaacacctctt

SEQ ID NO: 59533 - DNA, 41 bp, Homo sapiens; identical to SEQ ID NO: 4159
  source 1..41: mol_type = genomic DNA

SEQ ID NO: 59534 - DNA, 25 bp, Homo sapiens
  source 1..25: mol_type = genomic DNA
agcagcttcaaacctgccggggctt

SEQ ID NO: 59535 - DNA, 27 bp, Homo sapiens
  source 1..27: mol_type = genomic DNA
agcttacctcctcaaagcaatacactg

SEQ ID NO: 59536 - DNA, 36 bp, Homo sapiens; identical to SEQ ID NO: 7250
  source 1..36: mol_type = genomic DNA

SEQ ID NO: 59537 - DNA, 29 bp, Homo sapiens
  source 1..29: mol_type = genomic DNA
caacagaggcttacgaccccttatttacc

SEQ ID NO: 59538 - DNA, 37 bp, Homo sapiens; identical to SEQ ID NO: 8387
  source 1..37: mol_type = genomic DNA

SEQ ID NO: 59539 - DNA, 41 bp, Homo sapiens; identical to SEQ ID NO: 8794
  source 1..41: mol_type = genomic DNA

SEQ ID NO: 59540 - DNA, 48 bp, Homo sapiens; identical to SEQ ID NO: 10739
  source 1..48: mol_type = genomic DNA

SEQ ID NO: 59541 - DNA, 40 bp, Homo sapiens; identical to SEQ ID NO: 10749
  source 1..40: mol_type = genomic DNA

SEQ ID NO: 59542 - DNA, 28 bp, Homo sapiens
  source 1..28: mol_type = genomic DNA
cgggagaccggggttcaattccccgacg

SEQ ID NO: 59543 - DNA, 33 bp, Homo sapiens; identical to SEQ ID NO: 13202
  source 1..33: mol_type = genomic DNA

SEQ ID NO: 59544 - DNA, 32 bp, Homo sapiens; identical to SEQ ID NO: 13378
  source 1..32: mol_type = genomic DNA

SEQ ID NO: 59545 - DNA, 20 bp, Homo sapiens
  source 1..20: mol_type = genomic DNA
cttaggagatttcaacttaa

SEQ ID NO: 59546 - DNA, 42 bp, Homo sapiens; identical to SEQ ID NO: 14975
  source 1..42: mol_type = genomic DNA

SEQ ID NO: 59547 - DNA, 40 bp, Homo sapiens; identical to SEQ ID NO: 20625
  source 1..40: mol_type = genomic DNA

SEQ ID NO: 59548 - DNA, 37 bp, Homo sapiens; identical to SEQ ID NO: 21409
  source 1..37: mol_type = genomic DNA

SEQ ID NO: 59549 - DNA, 47 bp, Homo sapiens; identical to SEQ ID NO: 21547
  source 1..47: mol_type = genomic DNA

SEQ ID NO: 59550 - DNA, 41 bp, Homo sapiens; identical to SEQ ID NO: 21569
  source 1..41: mol_type = genomic DNA

SEQ ID NO: 59551 - DNA, 32 bp, Homo sapiens; identical to SEQ ID NO: 22222
  source 1..32: mol_type = genomic DNA

SEQ ID NO: 59552 - DNA, 31 bp, Homo sapiens; identical to SEQ ID NO: 22926
  source 1..31: mol_type = genomic DNA

SEQ ID NO: 59553 - DNA, 25 bp, Homo sapiens
  source 1..25: mol_type = genomic DNA
taacgccaaggtcgcgggttcgaac

SEQ ID NO: 59554 - DNA, 33 bp, Homo sapiens; identical to SEQ ID NO: 24144
  source 1..33: mol_type = genomic DNA

SEQ ID NO: 59555 - DNA, 33 bp, Homo sapiens; identical to SEQ ID NO: 24447
  source 1..33: mol_type = genomic DNA

SEQ ID NO: 59556 - DNA, 16 bp, Homo sapiens
  source 1..16: mol_type = genomic DNA
tcagtctcataatctg

SEQ ID NO: 59557 - DNA, 28 bp, Homo sapiens
  source 1..28: mol_type = genomic DNA
tcagtggtagaattctcgcctgccacgc

SEQ ID NO: 59558 - DNA, 34 bp, Homo sapiens; identical to SEQ ID NO: 25424
  source 1..34: mol_type = genomic DNA

SEQ ID NO: 59559 - DNA, 16 bp, Homo sapiens
  source 1..16: mol_type = genomic DNA
tcgaacctcagagggg

SEQ ID NO: 59560 - DNA, 44 bp, Homo sapiens; identical to SEQ ID NO: 27177
  source 1..44: mol_type = genomic DNA

SEQ ID NO: 59561 - DNA, 43 bp, Homo sapiens; identical to SEQ ID NO: 28652
  source 1..43: mol_type = genomic DNA

SEQ ID NO: 59562 - DNA, 16 bp, Homo sapiens
  source 1..16: mol_type = genomic DNA
ttaggagatttcaact

SEQ ID NO: 59563 - DNA, 31 bp, Homo sapiens; identical to SEQ ID NO: 29261
  source 1..31: mol_type = genomic DNA

SEQ ID NO: 59564 - DNA, 33 bp, Homo sapiens; identical to SEQ ID NO: 30347
  source 1..33: mol_type = genomic DNA

SEQ ID NO: 59565 - DNA, 24 bp, Homo sapiens
  source 1..24: mol_type = genomic DNA
ttggtgcaactccaaataaaagta

SEQ ID NO: 59566 - DNA, 40 bp, Homo sapiens; identical to SEQ ID NO: 30469
  source 1..40: mol_type = genomic DNA

SEQ ID NO: 59567 - DNA, 19 bp, Homo sapiens
  source 1..19: mol_type = genomic DNA
gagtgaagcattggactgt

SEQ ID NO: 59568 - DNA, 20 bp, Homo sapiens
  source 1..20: mol_type = genomic DNA
tgagtgaagcattggactgt

SEQ ID NO: 59569 - DNA, 26 bp, Homo sapiens
  source 1..26: mol_type = genomic DNA
ttggtcgtggttgtagtccgtgcgag

SEQ ID NO: 59570 - DNA, 22 bp, Homo sapiens
  source 1..22: mol_type = genomic DNA
atcattggtcgtggttgtagtc

SEQ ID NO: 59571 - DNA, 22 bp, Homo sapiens
  source 1..22: mol_type = genomic DNA
ctgccacgcgggaggcccgggt

SEQ ID NO: 59572 - DNA, 24 bp, Homo sapiens
  source 1..24: mol_type = genomic DNA
ctgtaaagctaacttagcattaac

SEQ ID NO: 59573 - DNA, 21 bp, Homo sapiens
  source 1..21: mol_type = genomic DNA
tcagtcggtagagcatgagac

SEQ ID NO: 59574 - DNA, 22 bp, Homo sapiens
  source 1..22: mol_type = genomic DNA
gttaggcctctttttaccacca

SEQ ID NO: 59575 - DNA, 29 bp, Homo sapiens
  source 1..29: mol_type = genomic DNA
ggtcgtggttgtagtccgtgcgagaatac

SEQ ID NO: 59576 - DNA, 25 bp, Homo sapiens
  source 1..25: mol_type = genomic DNA
gcgccgctggtgtagtggtatcatg

SEQ ID NO: 59577 - DNA, 24 bp, Homo sapiens
  source 1..24: mol_type = genomic DNA
ctagcggttaggattcctggtttt

SEQ ID NO: 59578 - DNA, 18 bp, Homo sapiens
  source 1..18: mol_type = genomic DNA
gtccctgtccaggcgcca

SEQ ID NO: 59579 - DNA, 24 bp, Homo sapiens
  source 1..24: mol_type = genomic DNA
ggagttaaagactttttctctgac

SEQ ID NO: 59580 - DNA, 21 bp, Homo sapiens
  source 1..21: mol_type = genomic DNA
taaacccccttatttctacca

SEQ ID NO: 59581 - DNA, 33 bp, Homo sapiens; identical to SEQ ID NO: 25479
  source 1..33: mol_type = genomic DNA

SEQ ID NO: 59582 - DNA, 30 bp, Homo sapiens; identical to SEQ ID NO: 10495
  source 1..30: mol_type = genomic DNA

SEQ ID NO: 59583 - DNA, 33 bp, Homo sapiens; identical to SEQ ID NO: 13256
  source 1..33: mol_type = genomic DNA

SEQ ID NO: 59584 - DNA, 29 bp, Homo sapiens
  source 1..29: mol_type = genomic DNA
gagtgaagcattggactgtaaatctaaag

SEQ ID NO: 59585 - DNA, 34 bp, Homo sapiens; identical to SEQ ID NO: 20367
  source 1..34: mol_type = genomic DNA

SEQ ID NO: 59586 - DNA, 36 bp, Homo sapiens; identical to SEQ ID NO: 21408
  source 1..36: mol_type = genomic DNA

SEQ ID NO: 59587 - DNA, 29 bp, Homo sapiens
  source 1..29: mol_type = genomic DNA
caggcggcccgggttcgactcccggtgtg

SEQ ID NO: 59588 - DNA, 25 bp, Homo sapiens
  source 1..25: mol_type = genomic DNA
gctggtgtagtggtatcatgcaaga

SEQ ID NO: 59589 - DNA, 30 bp, Homo sapiens; identical to SEQ ID NO: 1152
  source 1..30: mol_type = genomic DNA

SEQ ID NO: 59590 - DNA, 26 bp, Homo sapiens
  source 1..26: mol_type = genomic DNA
ctggactctgaatccagcgatccgag

SEQ ID NO: 59591 - DNA, 26 bp, Homo sapiens
  source 1..26: mol_type = genomic DNA
gttggttatacccttcccgtactacc

SEQ ID NO: 59592 - DNA, 16 bp, Homo sapiens
  source 1..16: mol_type = genomic DNA
attctcgcctgccacg

SEQ ID NO: 59593 - DNA, 21 bp, Homo sapiens
  source 1..21: mol_type = genomic DNA
gttcgatcccgggtttcggca

SEQ ID NO: 59594 - DNA, 25 bp, Homo sapiens
  source 1..25: mol_type = genomic DNA
gcccccatgtctaacaacatggctt

SEQ ID NO: 59595 - DNA, 23 bp, Homo sapiens
  source 1..23: mol_type = genomic DNA
gtagcgtggccgagcggtctaag

SEQ ID NO: 59596 - DNA, 27 bp, Homo sapiens
  source 1..27: mol_type = genomic DNA
gtaagttgcaatacttaatttctgcca

SEQ ID NO: 59597 - DNA, 22 bp, Homo sapiens
  source 1..22: mol_type = genomic DNA
gaaagctcacaagaactgctaa

SEQ ID NO: 59598 - DNA, 27 bp, Homo sapiens
  source 1..27: mol_type = genomic DNA
ggcggcccgggttcgactcccggtgtg

SEQ ID NO: 59599 - DNA, 20 bp, Homo sapiens
  source 1..20: mol_type = genomic DNA
gtttgtgggtttaagtccca

SEQ ID NO: 59600 - DNA, 34 bp, Homo sapiens; identical to SEQ ID NO: 18756
  source 1..34: mol_type = genomic DNA

SEQ ID NO: 59601 - DNA, 27 bp, Homo sapiens
  source 1..27: mol_type = genomic DNA
agagaaccaacacctctttacagtgac

SEQ ID NO: 59602 - DNA, 27 bp, Homo sapiens
  source 1..27: mol_type = genomic DNA
acaggggttaggcctctttttaccacc

SEQ ID NO: 59603 - DNA, 22 bp, Homo sapiens
  source 1..22: mol_type = genomic DNA
cttaggagatttcaacttaact

SEQ ID NO: 59604 - DNA, 32 bp, Homo sapiens; identical to SEQ ID NO: 18692
  source 1..32: mol_type = genomic DNA

SEQ ID NO: 59605 - DNA, 16 bp, Homo sapiens
  source 1..16: mol_type = genomic DNA
ggtagagcatgggact

SEQ ID NO: 59606 - DNA, 27 bp, Homo sapiens
  source 1..27: mol_type = genomic DNA
ggtaatcgcataaaacttaaaacttta

SEQ ID NO: 59607 - DNA, 26 bp, Homo sapiens
  source 1..26: mol_type = genomic DNA
cacccaacttacacttaggagatttc

SEQ ID NO: 59608 - DNA, 21 bp, Homo sapiens
  source 1..21: mol_type = genomic DNA
gctttggggggttcgattcct

SEQ ID NO: 59609 - DNA, 18 bp, Homo sapiens
  source 1..18: mol_type = genomic DNA
aaccaggcggaaacacca

SEQ ID NO: 59610 - DNA, 23 bp, Homo sapiens
  source 1..23: mol_type = genomic DNA
acaaaacgaatgatttcgactca

SEQ ID NO: 59611 - DNA, 37 bp, Homo sapiens; identical to SEQ ID NO: 22460
  source 1..37: mol_type = genomic DNA

SEQ ID NO: 59612 - DNA, 40 bp, Homo sapiens; identical to SEQ ID NO: 1732
  source 1..40: mol_type = genomic DNA

SEQ ID NO: 59613 - DNA, 43 bp, Homo sapiens; identical to SEQ ID NO: 15268
  source 1..43: mol_type = genomic DNA

SEQ ID NO: 59614 - DNA, 40 bp, Homo sapiens; identical to SEQ ID NO: 16647
  source 1..40: mol_type = genomic DNA

SEQ ID NO: 59615 - DNA, 17 bp, Homo sapiens
  source 1..17: mol_type = genomic DNA
gctagctcagtcggtag

SEQ ID NO: 59616 - DNA, 23 bp, Homo sapiens
  source 1..23: mol_type = genomic DNA
gtttaaccaaaacatcagattgt

SEQ ID NO: 59617 - DNA, 24 bp, Homo sapiens
  source 1..24: mol_type = genomic DNA
tacctcctcaaagcaatacactga

SEQ ID NO: 59618 - DNA, 33 bp, Homo sapiens; identical to SEQ ID NO: 18411
  source 1..33: mol_type = genomic DNA

SEQ ID NO: 59619 - DNA, 23 bp, Homo sapiens
  source 1..23: mol_type = genomic DNA
gttcaattcctcttcttaacacc

SEQ ID NO: 59620 - DNA, 22 bp, Homo sapiens
  source 1..22: mol_type = genomic DNA
ttaggattcggcgctctcaccg

SEQ ID NO: 59621 - DNA, 29 bp, Homo sapiens
  source 1..29: mol_type = genomic DNA
ttggtggttcgatcccacccagggacgcc

SEQ ID NO: 59622 - DNA, 16 bp, Homo sapiens
  source 1..16: mol_type = genomic DNA
aggtcagctaaataag

SEQ ID NO: 59623 - DNA, 44 bp, Homo sapiens; identical to SEQ ID NO: 16651
  source 1..44: mol_type = genomic DNA

SEQ ID NO: 59624 - DNA, 27 bp, Homo sapiens
  source 1..27: mol_type = genomic DNA
aggagcttaaacccccttatttctacc

SEQ ID NO: 59625 - DNA, 32 bp, Homo sapiens; identical to SEQ ID NO: 17006
  source 1..32: mol_type = genomic DNA

SEQ ID NO: 59626 - DNA, 31 bp, Homo sapiens; identical to SEQ ID NO: 25557
  source 1..31: mol_type = genomic DNA

SEQ ID NO: 59627 - DNA, 21 bp, Homo sapiens
  source 1..21: mol_type = genomic DNA
aaccaacacctctttacagtg

SEQ ID NO: 59628 - DNA, 38 bp, Homo sapiens; identical to SEQ ID NO: 1483
  source 1..38: mol_type = genomic DNA

SEQ ID NO: 59629 - DNA, 24 bp, Homo sapiens
  source 1..24: mol_type = genomic DNA
gcagcttcaaacctgccggggctt

SEQ ID NO: 59630 - DNA, 37 bp, Homo sapiens; identical to SEQ ID NO: 26429
  source 1..37: mol_type = genomic DNA

SEQ ID NO: 59631 - DNA, 37 bp, Homo sapiens; identical to SEQ ID NO: 29552
  source 1..37: mol_type = genomic DNA

SEQ ID NO: 59632 - DNA, 18 bp, Homo sapiens
  source 1..18: mol_type = genomic DNA
gatagctcagtcggtaga

SEQ ID NO: 59633 - DNA, 17 bp, Homo sapiens
  source 1..17: mol_type = genomic DNA
aaagctcacaagaactg

SEQ ID NO: 59634 - DNA, 28 bp, Homo sapiens
  source 1..28: mol_type = genomic DNA
aacagaggcttacgaccccttatttacc

SEQ ID NO: 59635 - DNA, 46 bp, Homo sapiens; identical to SEQ ID NO: 1288
  source 1..46: mol_type = genomic DNA

SEQ ID NO: 59636 - DNA, 27 bp, Homo sapiens
  source 1..27: mol_type = genomic DNA
aatgttggttatacccttcccgtacta

SEQ ID NO: 59637 - DNA, 41 bp, Homo sapiens; identical to SEQ ID NO: 2455
  source 1..41: mol_type = genomic DNA

SEQ ID NO: 59638 - DNA, 45 bp, Homo sapiens; identical to SEQ ID NO: 2458
  source 1..45: mol_type = genomic DNA

SEQ ID NO: 59639 - DNA, 37 bp, Homo sapiens; identical to SEQ ID NO: 2795
  source 1..37: mol_type = genomic DNA

SEQ ID NO: 59640 - DNA, 34 bp, Homo sapiens; identical to SEQ ID NO: 3107
  source 1..34: mol_type = genomic DNA

SEQ ID NO: 59641 - DNA, 33 bp, Homo sapiens; identical to SEQ ID NO: 4184
  source 1..33: mol_type = genomic DNA

SEQ ID NO: 59642 - DNA, 29 bp, Homo sapiens
  source 1..29: mol_type = genomic DNA
agcgatccgagttcaaatctcggtggaac

SEQ ID NO: 59643 - DNA, 30 bp, Homo sapiens; identical to SEQ ID NO: 5865
  source 1..30: mol_type = genomic DNA

SEQ ID NO: 59644 - DNA, 16 bp, Homo sapiens
  source 1..16: mol_type = genomic DNA
atcctatatatcttac

SEQ ID NO: 59645 - DNA, 36 bp, Homo sapiens; identical to SEQ ID NO: 6656
  source 1..36: mol_type = genomic DNA

SEQ ID NO: 59646 - DNA, 17 bp, Homo sapiens
  source 1..17: mol_type = genomic DNA
caactccaaataaaagt

SEQ ID NO: 59647 - DNA, 38 bp, Homo sapiens; identical to SEQ ID NO: 8357
  source 1..38: mol_type = genomic DNA

SEQ ID NO: 59648 - DNA, 34 bp, Homo sapiens; identical to SEQ ID NO: 8877
  source 1..34: mol_type = genomic DNA

SEQ ID NO: 59649 - DNA, 24 bp, Homo sapiens
  source 1..24: mol_type = genomic DNA
cagtctcataatctgaaggtcctg

SEQ ID NO: 59650 - DNA, 48 bp, Homo sapiens; identical to SEQ ID NO: 9548
  source 1..48: mol_type = genomic DNA

SEQ ID NO: 59651 - DNA, 41 bp, Homo sapiens; identical to SEQ ID NO: 11549
  source 1..41: mol_type = genomic DNA

SEQ ID NO: 59652 - DNA, 32 bp, Homo sapiens; identical to SEQ ID NO: 12248
  source 1..32: mol_type = genomic DNA

SEQ ID NO: 59653 - DNA, 25 bp, Homo sapiens
  source 1..25: mol_type = genomic DNA
cgggcccataccccgaaaatgttgg

SEQ ID NO: 59654 - DNA, 28 bp, Homo sapiens
  source 1..28: mol_type = genomic DNA
cgttaacttccaattaactagttttgac

SEQ ID NO: 59655 - DNA, 18 bp, Homo sapiens
  source 1..18: mol_type = genomic DNA
ctcagggatgggttcgat

SEQ ID NO: 59656 - DNA, 38 bp, Homo sapiens; identical to SEQ ID NO: 13731
  source 1..38: mol_type = genomic DNA

SEQ ID NO: 59657 - DNA, 44 bp, Homo sapiens; identical to SEQ ID NO: 14399
  source 1..44: mol_type = genomic DNA

SEQ ID NO: 59658 - DNA, 16 bp, Homo sapiens
  source 1..16: mol_type = genomic DNA
cttaatctcagggtcg

SEQ ID NO: 59659 - DNA, 33 bp, Homo sapiens; identical to SEQ ID NO: 14500
  source 1..33: mol_type = genomic DNA

SEQ ID NO: 59660 - DNA, 33 bp, Homo sapiens; identical to SEQ ID NO: 15287
  source 1..33: mol_type = genomic DNA

SEQ ID NO: 59661 - DNA, 43 bp, Homo sapiens; identical to SEQ ID NO: 16845
  source 1..43: mol_type = genomic DNA

SEQ ID NO: 59662 - DNA, 46 bp, Homo sapiens; identical to SEQ ID NO: 17021
  source 1..46: mol_type = genomic DNA

SEQ ID NO: 59663 - DNA, 32 bp, Homo sapiens; identical to SEQ ID NO: 17143
  source 1..32: mol_type = genomic DNA

SEQ ID NO: 59664 - DNA, 33 bp, Homo sapiens; identical to SEQ ID NO: 18221
  source 1..33: mol_type = genomic DNA

SEQ ID NO: 59665 - DNA, 17 bp, Homo sapiens
  source 1..17: mol_type = genomic DNA
ggggttcgattccttcc

SEQ ID NO: 59666 - DNA, 40 bp, Homo sapiens; identical to SEQ ID NO: 19243
  source 1..40: mol_type = genomic DNA

SEQ ID NO: 59667 - DNA, 34 bp, Homo sapiens; identical to SEQ ID NO: 20409
  source 1..34: mol_type = genomic DNA

SEQ ID NO: 59668 - DNA, 36 bp, Homo sapiens; identical to SEQ ID NO: 20623
  source 1..36: mol_type = genomic DNA

SEQ ID NO: 59669 - DNA, 34 bp, Homo sapiens; identical to SEQ ID NO: 20815
  source 1..34: mol_type = genomic DNA

SEQ ID NO: 59670 - DNA, 31 bp, Homo sapiens; identical to SEQ ID NO: 22605
  source 1..31: mol_type = genomic DNA

SEQ ID NO: 59671 - DNA, 16 bp, Homo sapiens
  source 1..16: mol_type = genomic DNA
taactagttttgacaa

SEQ ID NO: 59672 - DNA, 41 bp, Homo sapiens; identical to SEQ ID NO: 23279
  source 1..41: mol_type = genomic DNA

SEQ ID NO: 59673 - DNA, 26 bp, Homo sapiens
  source 1..26: mol_type = genomic DNA
taatggtggagttaaagactttttct

SEQ ID NO: 59674 - DNA, 37 bp, Homo sapiens; identical to SEQ ID NO: 24085
  source 1..37: mol_type = genomic DNA

SEQ ID NO: 59675 - DNA, 35 bp, Homo sapiens; identical to SEQ ID NO: 24904
  source 1..35: mol_type = genomic DNA

SEQ ID NO: 59676 - DNA, 34 bp, Homo sapiens; identical to SEQ ID NO: 25300
  source 1..34: mol_type = genomic DNA

SEQ ID NO: 59677 - DNA, 37 bp, Homo sapiens; identical to SEQ ID NO: 26409
  source 1..37: mol_type = genomic DNA

SEQ ID NO: 59678 - DNA, 26 bp, Homo sapiens
  source 1..26: mol_type = genomic DNA
tgaattgcaaattcgaagaagcagct

SEQ ID NO: 59679 - DNA, 31 bp, Homo sapiens; identical to SEQ ID NO: 28341
  source 1..31: mol_type = genomic DNA

SEQ ID NO: 59680 - DNA, 17 bp, Homo sapiens
  source 1..17: mol_type = genomic DNA
ttaactagttttgacaa

SEQ ID NO: 59681 - DNA, 28 bp, Homo sapiens
  source 1..28: mol_type = genomic DNA
ttaacttccaattaactagttttgacaa

SEQ ID NO: 59682 - DNA, 38 bp, Homo sapiens; identical to SEQ ID NO: 28996
  source 1..38: mol_type = genomic DNA

SEQ ID NO: 59683 - DNA, 35 bp, Homo sapiens; identical to SEQ ID NO: 29550
  source 1..35: mol_type = genomic DNA

SEQ ID NO: 59684 - DNA, 27 bp, Homo sapiens
  source 1..27: mol_type = genomic DNA
ttggtggttcgatcccacccagggacg

SEQ ID NO: 59685 - DNA, 28 bp, Homo sapiens
  source 1..28: mol_type = genomic DNA
ttttgacaacattcaaaaaagagtacca

SEQ ID NO: 59686 - DNA, 24 bp, Homo sapiens
  source 1..24: mol_type = genomic DNA
caacttaacttgaccgctctgacc

SEQ ID NO: 59687 - DNA, 21 bp, Homo sapiens
  source 1..21: mol_type = genomic DNA
ttaaagactttttctctgacc

SEQ ID NO: 59688 - DNA, 25 bp, Homo sapiens
  source 1..25: mol_type = genomic DNA
tcaacttaacttgaccgctctgacc

SEQ ID NO: 59689 - DNA, 17 bp, Homo sapiens
  source 1..17: mol_type = genomic DNA
tccgggtgccccctcca

SEQ ID NO: 59690 - DNA, 27 bp, Homo sapiens
  source 1..27: mol_type = genomic DNA
tttcaacttaacttgaccgctctgacc

SEQ ID NO: 59691 - DNA, 30 bp, Homo sapiens; identical to SEQ ID NO: 27558
  source 1..30: mol_type = genomic DNA

SEQ ID NO: 59692 - DNA, 20 bp, Homo sapiens
  source 1..20: mol_type = genomic DNA
gcatgggtggttcagtggta

SEQ ID NO: 59693 - DNA, 17 bp, Homo sapiens
  source 1..17: mol_type = genomic DNA
tcacgtcggggtcacca

SEQ ID NO: 59694 - DNA, 21 bp, Homo sapiens
  source 1..21: mol_type = genomic DNA
gcgttcaggtcgcagtctccc

SEQ ID NO: 59695 - DNA, 16 bp, Homo sapiens
  source 1..16: mol_type = genomic DNA
caacttaacttgaccg

SEQ ID NO: 59696 - DNA, 25 bp, Homo sapiens
  source 1..25: mol_type = genomic DNA
tccctggtggtctagtggttaggat

SEQ ID NO: 59697 - DNA, 27 bp, Homo sapiens
  source 1..27: mol_type = genomic DNA
ctggactctgaatccagcgatccgagt

SEQ ID NO: 59698 - DNA, 27 bp, Homo sapiens
  source 1..27: mol_type = genomic DNA
atttcaacttaacttgaccgctctgac

SEQ ID NO: 59699 - DNA, 26 bp, Homo sapiens
  source 1..26: mol_type = genomic DNA
gtggttgtagtccgtgcgagaatacc

SEQ ID NO: 59700 - DNA, 23 bp, Homo sapiens
  source 1..23: mol_type = genomic DNA
gtcgtggttgtagtccgtgcgag

SEQ ID NO: 59701 - DNA, 24 bp, Homo sapiens
  source 1..24: mol_type = genomic DNA
gcgttggtggtatagtggttagca

SEQ ID NO: 59702 - DNA, 28 bp, Homo sapiens
  source 1..28: mol_type = genomic DNA
gagaaccaacacctctttacagtgacca

SEQ ID NO: 59703 - DNA, 21 bp, Homo sapiens
  source 1..21: mol_type = genomic DNA
tcgaatccgagtcacggcacc

SEQ ID NO: 59704 - DNA, 28 bp, Homo sapiens
  source 1..28: mol_type = genomic DNA
gcgttggtggtatagtggtaagcatagc

SEQ ID NO: 59705 - DNA, 20 bp, Homo sapiens
  source 1..20: mol_type = genomic DNA
gggggtatagctcagtggta

SEQ ID NO: 59706 - DNA, 23 bp, Homo sapiens
  source 1..23: mol_type = genomic DNA
tccctggtggtctagtggctagg

SEQ ID NO: 59707 - DNA, 30 bp, Homo sapiens; identical to SEQ ID NO: 22220
  source 1..30: mol_type = genomic DNA

SEQ ID NO: 59708 - DNA, 29 bp, Homo sapiens
  source 1..29: mol_type = genomic DNA
ggttccatagtgtagcggttatcacgtct

SEQ ID NO: 59709 - DNA, 27 bp, Homo sapiens
  source 1..27: mol_type = genomic DNA
tcattggtcgtggttgtagtccgtgcg

SEQ ID NO: 59710 - DNA, 32 bp, Homo sapiens; identical to SEQ ID NO: 16829
  source 1..32: mol_type = genomic DNA

SEQ ID NO: 59711 - DNA, 30 bp, Homo sapiens; identical to SEQ ID NO: 24039
  source 1..30: mol_type = genomic DNA

SEQ ID NO: 59712 - DNA, 32 bp, Homo sapiens; identical to SEQ ID NO: 30379
  source 1..32: mol_type = genomic DNA

SEQ ID NO: 59713 - DNA, 32 bp, Homo sapiens; identical to SEQ ID NO: 25478
  source 1..32: mol_type = genomic DNA

SEQ ID NO: 59714 - DNA, 25 bp, Homo sapiens
  source 1..25: mol_type = genomic DNA
gtcgtggttgtagtccgtgcgagaa

SEQ ID NO: 59715 - DNA, 30 bp, Homo sapiens; identical to SEQ ID NO: 7529
  source 1..30: mol_type = genomic DNA

SEQ ID NO: 59716 - DNA, 31 bp, Homo sapiens; identical to SEQ ID NO: 30378
  source 1..31: mol_type = genomic DNA

SEQ ID NO: 59717 - DNA, 21 bp, Homo sapiens
  source 1..21: mol_type = genomic DNA
ggattcggcgctctcaccgcc

SEQ ID NO: 59718 - DNA, 32 bp, Homo sapiens; identical to SEQ ID NO: 6406
  source 1..32: mol_type = genomic DNA

SEQ ID NO: 59719 - DNA, 17 bp, Homo sapiens
  source 1..17: mol_type = genomic DNA
gaaaaagtcatggaggc

SEQ ID NO: 59720 - DNA, 22 bp, Homo sapiens
  source 1..22: mol_type = genomic DNA
ttggtggttcagtggtagaatt

SEQ ID NO: 59721 - DNA, 28 bp, Homo sapiens
  source 1..28: mol_type = genomic DNA
tggtagaattctcgcctgccacgcggga

SEQ ID NO: 59722 - DNA, 32 bp, Homo sapiens; identical to SEQ ID NO: 10377
  source 1..32: mol_type = genomic DNA

SEQ ID NO: 59723 - DNA, 36 bp, Homo sapiens; identical to SEQ ID NO: 7568
  source 1..36: mol_type = genomic DNA

SEQ ID NO: 59724 - DNA, 24 bp, Homo sapiens
  source 1..24: mol_type = genomic DNA
gtctagcggttaggattcctggtt

SEQ ID NO: 59725 - DNA, 21 bp, Homo sapiens
  source 1..21: mol_type = genomic DNA
aagtgtttgtgggtttaagtc

SEQ ID NO: 59726 - DNA, 18 bp, Homo sapiens
  source 1..18: mol_type = genomic DNA
gctctcaccgccgcggcc

SEQ ID NO: 59727 - DNA, 30 bp, Homo sapiens; identical to SEQ ID NO: 27917
  source 1..30: mol_type = genomic DNA

SEQ ID NO: 59728 - DNA, 28 bp, Homo sapiens
  source 1..28: mol_type = genomic DNA
atggttagcactctggactttgaatcca

SEQ ID NO: 59729 - DNA, 18 bp, Homo sapiens
  source 1..18: mol_type = genomic DNA
atagctcagtcggtagag

SEQ ID NO: 59730 - DNA, 26 bp, Homo sapiens
  source 1..26: mol_type = genomic DNA
tccctggtggtctagtggctaggatt

SEQ ID NO: 59731 - DNA, 30 bp, Homo sapiens; identical to SEQ ID NO: 16459
  source 1..30: mol_type = genomic DNA

SEQ ID NO: 59732 - DNA, 22 bp, Homo sapiens
  source 1..22: mol_type = genomic DNA
aagattaagagaaccaacacct

SEQ ID NO: 59733 - DNA, 38 bp, Homo sapiens; identical to SEQ ID NO: 19700
  source 1..38: mol_type = genomic DNA

SEQ ID NO: 59734 - DNA, 25 bp, Homo sapiens
  source 1..25: mol_type = genomic DNA
gaggcttacgaccccttatttaccc

SEQ ID NO: 59735 - DNA, 23 bp, Homo sapiens
  source 1..23: mol_type = genomic DNA
tgctaatggtggagttaaagact

SEQ ID NO: 59736 - DNA, 21 bp, Homo sapiens
  source 1..21: mol_type = genomic DNA
tagtggttatcacgtctgctt

SEQ ID NO: 59737 - DNA, 19 bp, Homo sapiens
  source 1..19: mol_type = genomic DNA
aggattcggcgctctcacc

SEQ ID NO: 59738 - DNA, 17 bp, Homo sapiens
  source 1..17: mol_type = genomic DNA
cgccgctggtgtagtgg

SEQ ID NO: 59739 - DNA, 25 bp, Homo sapiens
  source 1..25: mol_type = genomic DNA
tcgtggttgtagtccgtgcgagaat

SEQ ID NO: 59740 - DNA, 30 bp, Homo sapiens; identical to SEQ ID NO: 24958
  source 1..30: mol_type = genomic DNA

SEQ ID NO: 59741 - DNA, 29 bp, Homo sapiens
  source 1..29: mol_type = genomic DNA
ataggagcttaaacccccttatttctacc

SEQ ID NO: 59742 - DNA, 18 bp, Homo sapiens
  source 1..18: mol_type = genomic DNA
atacccttcccgtactac

SEQ ID NO: 59743 - DNA, 25 bp, Homo sapiens
  source 1..25: mol_type = genomic DNA
gctagctcagtcggtagagcatgag

SEQ ID NO: 59744 - DNA, 18 bp, Homo sapiens
  source 1..18: mol_type = genomic DNA
aattttggtgcaactcca

SEQ ID NO: 59745 - DNA, 16 bp, Homo sapiens
  source 1..16: mol_type = genomic DNA
acctctttacagtgac

SEQ ID NO: 59746 - DNA, 44 bp, Homo sapiens; identical to SEQ ID NO: 7610
  source 1..44: mol_type = genomic DNA

SEQ ID NO: 59747 - DNA, 42 bp, Homo sapiens; identical to SEQ ID NO: 14797
  source 1..42: mol_type = genomic DNA

SEQ ID NO: 59748 - DNA, 26 bp, Homo sapiens
  source 1..26: mol_type = genomic DNA
tggtgtagtggtatcatgcaagattc

SEQ ID NO: 59749 - DNA, 20 bp, Homo sapiens
  source 1..20: mol_type = genomic DNA
catcagattgtgaatctgac

SEQ ID NO: 59750 - DNA, 19 bp, Homo sapiens
  source 1..19: mol_type = genomic DNA
tcgaatccggctcgaagga

SEQ ID NO: 59751 - DNA, 39 bp, Homo sapiens; identical to SEQ ID NO: 3227
  source 1..39: mol_type = genomic DNA

SEQ ID NO: 59752 - DNA, 35 bp, Homo sapiens; identical to SEQ ID NO: 6892
  source 1..35: mol_type = genomic DNA

SEQ ID NO: 59753 - DNA, 24 bp, Homo sapiens
  source 1..24: mol_type = genomic DNA
aaagctcacaagaactgctaactc

SEQ ID NO: 59754 - DNA, 16 bp, Homo sapiens
  source 1..16: mol_type = genomic DNA
aaacatcagattgtga

SEQ ID NO: 59755 - DNA, 34 bp, Homo sapiens; identical to SEQ ID NO: 7600
  source 1..34: mol_type = genomic DNA

SEQ ID NO: 59756 - DNA, 34 bp, Homo sapiens; identical to SEQ ID NO: 2160
  source 1..34: mol_type = genomic DNA

SEQ ID NO: 59757 - DNA, 23 bp, Homo sapiens
  source 1..23: mol_type = genomic DNA
agacgggctcacatcaccccata

SEQ ID NO: 59758 - DNA, 32 bp, Homo sapiens; identical to SEQ ID NO: 19919
  source 1..32: mol_type = genomic DNA

SEQ ID NO: 59759 - DNA, 37 bp, Homo sapiens; identical to SEQ ID NO: 31109
  source 1..37: mol_type = genomic DNA

SEQ ID NO: 59760 - DNA, 43 bp, Homo sapiens; identical to SEQ ID NO: 17864
  source 1..43: mol_type = genomic DNA

SEQ ID NO: 59761 - DNA, 17 bp, Homo sapiens
  source 1..17: mol_type = genomic DNA
aagttctggtctccgga

SEQ ID NO: 59762 - DNA, 38 bp, Homo sapiens; identical to SEQ ID NO: 16291
  source 1..38: mol_type = genomic DNA

SEQ ID NO: 59763 - DNA, 32 bp, Homo sapiens; identical to SEQ ID NO: 18633
  source 1..32: mol_type = genomic DNA

SEQ ID NO: 59764 - DNA, 24 bp, Homo sapiens
  source 1..24: mol_type = genomic DNA
ggttcgattcccggccaatgcacc

SEQ ID NO: 59765 - DNA, 28 bp, Homo sapiens
  source 1..28: mol_type = genomic DNA
acagaggcttacgaccccttatttaccc

SEQ ID NO: 59766 - DNA, 29 bp, Homo sapiens
  source 1..29: mol_type = genomic DNA
agcagttgacccgggttcgattcccggcc

SEQ ID NO: 59767 - DNA, 22 bp, Homo sapiens
  source 1..22: mol_type = genomic DNA
agctttggggggttcgattcct

SEQ ID NO: 59768 - DNA, 30 bp, Homo sapiens; identical to SEQ ID NO: 8278
  source 1..30: mol_type = genomic DNA

SEQ ID NO: 59769 - DNA, 42 bp, Homo sapiens; identical to SEQ ID NO: 23280
  source 1..42: mol_type = genomic DNA

SEQ ID NO: 59770 - DNA, 36 bp, Homo sapiens; identical to SEQ ID NO: 23695
  source 1..36: mol_type = genomic DNA

SEQ ID NO: 59771 - DNA, 22 bp, Homo sapiens
  source 1..22: mol_type = genomic DNA
caacacctctttacagtgacca

SEQ ID NO: 59772 - DNA, 17 bp, Homo sapiens
  source 1..17: mol_type = genomic DNA
ctcccggtgtgggaacc

SEQ ID NO: 59773 - DNA, 17 bp, Homo sapiens
  source 1..17: mol_type = genomic DNA
ctccaaataaaagtacc

SEQ ID NO: 59774 - DNA, 18 bp, Homo sapiens
  source 1..18: mol_type = genomic DNA
actccaaataaaagtacc

SEQ ID NO: 59775 - DNA, 20 bp, Homo sapiens
  source 1..20: mol_type = genomic DNA
gataatcatatttaccaacc

SEQ ID NO: 59776 - DNA, 18 bp, Homo sapiens
  source 1..18: mol_type = genomic DNA
aaaccggagatgaaaacc

SEQ ID NO: 59777 - DNA, 33 bp, Homo sapiens; identical to SEQ ID NO: 1052
  source 1..33: mol_type = genomic DNA

SEQ ID NO: 59778 - DNA, 33 bp, Homo sapiens; identical to SEQ ID NO: 1625
  source 1..33: mol_type = genomic DNA

SEQ ID NO: 59779 - DNA, 33 bp, Homo sapiens; identical to SEQ ID NO: 2572
  source 1..33: mol_type = genomic DNA

SEQ ID NO: 59780 - DNA, 29 bp, Homo sapiens
  source 1..29: mol_type = genomic DNA
acaggagatcctgggttcgaatcccagcg

SEQ ID NO: 59781 - DNA, 32 bp, Homo sapiens; identical to SEQ ID NO: 3076
  source 1..32: mol_type = genomic DNA

SEQ ID NO: 59782 - DNA, 39 bp, Homo sapiens; identical to SEQ ID NO: 3083
  source 1..39: mol_type = genomic DNA

SEQ ID NO: 59783 - DNA, 36 bp, Homo sapiens; identical to SEQ ID NO: 4000
  source 1..36: mol_type = genomic DNA

SEQ ID NO: 59784 - DNA, 29 bp, Homo sapiens
  source 1..29: mol_type = genomic DNA
agcactctggactttgaatccagcgatcc

SEQ ID NO: 59785 - DNA, 33 bp, Homo sapiens; identical to SEQ ID NO: 4660
  source 1..33: mol_type = genomic DNA

SEQ ID NO: 59786 - DNA, 36 bp, Homo sapiens; identical to SEQ ID NO: 4924
  source 1..36: mol_type = genomic DNA

SEQ ID NO: 59787 - DNA, 39 bp, Homo sapiens; identical to SEQ ID NO: 5421
  source 1..39: mol_type = genomic DNA

SEQ ID NO: 59788 - DNA, 25 bp, Homo sapiens
  source 1..25: mol_type = genomic DNA
atcctgggttcgaatcccagcggtg

SEQ ID NO: 59789 - DNA, 17 bp, Homo sapiens
  source 1..17: mol_type = genomic DNA
attagaatcttagcttt

SEQ ID NO: 59790 - DNA, 38 bp, Homo sapiens; identical to SEQ ID NO: 7403
  source 1..38: mol_type = genomic DNA

SEQ ID NO: 59791 - DNA, 46 bp, Homo sapiens; identical to SEQ ID NO: 8234
  source 1..46: mol_type = genomic DNA

SEQ ID NO: 59792 - DNA, 44 bp, Homo sapiens; identical to SEQ ID NO: 8797
  source 1..44: mol_type = genomic DNA

SEQ ID NO: 59793 - DNA, 29 bp, Homo sapiens
  source 1..29: mol_type = genomic DNA
cagctaaataagctatcgggcccataccc

SEQ ID NO: 59794 - DNA, 32 bp, Homo sapiens; identical to SEQ ID NO: 9679
  source 1..32: mol_type = genomic DNA

SEQ ID NO: 59795 - DNA, 35 bp, Homo sapiens; identical to SEQ ID NO: 9802
  source 1..35: mol_type = genomic DNA

SEQ ID NO: 59796 - DNA, 18 bp, Homo sapiens
  source 1..18: mol_type = genomic DNA
ccaagcagttgacccggg

SEQ ID NO: 59797 - DNA, 17 bp, Homo sapiens
  source 1..17: mol_type = genomic DNA
ccagagtgtagcttaac

SEQ ID NO: 59798 - DNA, 19 bp, Homo sapiens
  source 1..19: mol_type = genomic DNA
cccataccccgaaaatgtt

SEQ ID NO: 59799 - DNA, 32 bp, Homo sapiens; identical to SEQ ID NO: 10582
  source 1..32: mol_type = genomic DNA

SEQ ID NO: 59800 - DNA, 32 bp, Homo sapiens; identical to SEQ ID NO: 10829
  source 1..32: mol_type = genomic DNA

SEQ ID NO: 59801 - DNA, 38 bp, Homo sapiens; identical to SEQ ID NO: 12098
  source 1..38: mol_type = genomic DNA

SEQ ID NO: 59802 - DNA, 23 bp, Homo sapiens
  source 1..23: mol_type = genomic DNA
cggcccgggttcgactcccggtg

SEQ ID NO: 59803 - DNA, 26 bp, Homo sapiens
  source 1..26: mol_type = genomic DNA
cggtagagcatgggactcttaatccc

SEQ ID NO: 59804 - DNA, 32 bp, Homo sapiens; identical to SEQ ID NO: 13255
  source 1..32: mol_type = genomic DNA

SEQ ID NO: 59805 - DNA, 19 bp, Homo sapiens
  source 1..19: mol_type = genomic DNA
cttaattaaagtggctgat

SEQ ID NO: 59806 - DNA, 46 bp, Homo sapiens; identical to SEQ ID NO: 14566
  source 1..46: mol_type = genomic DNA

SEQ ID NO: 59807 - DNA, 39 bp, Homo sapiens; identical to SEQ ID NO: 14693
  source 1..39: mol_type = genomic DNA

SEQ ID NO: 59808 - DNA, 48 bp, Homo sapiens; identical to SEQ ID NO: 14981
  source 1..48: mol_type = genomic DNA

SEQ ID NO: 59809 - DNA, 29 bp, Homo sapiens
  source 1..29: mol_type = genomic DNA
gaaggctgcgtgttcgaatcacgtcgggg

SEQ ID NO: 59810 - DNA, 26 bp, Homo sapiens
  source 1..26: mol_type = genomic DNA
gaattgcaaattcgaagaagcagctt

SEQ ID NO: 59811 - DNA, 32 bp, Homo sapiens; identical to SEQ ID NO: 15801
  source 1..32: mol_type = genomic DNA

SEQ ID NO: 59812 - DNA, 39 bp, Homo sapiens; identical to SEQ ID NO: 16062
  source 1..39: mol_type = genomic DNA

SEQ ID NO: 59813 - DNA, 34 bp, Homo sapiens; identical to SEQ ID NO: 16184
  source 1..34: mol_type = genomic DNA

SEQ ID NO: 59814 - DNA, 34 bp, Homo sapiens; identical to SEQ ID NO: 16913
  source 1..34: mol_type = genomic DNA

SEQ ID NO: 59815 - DNA, 34 bp, Homo sapiens; identical to SEQ ID NO: 17216
  source 1..34: mol_type = genomic DNA

SEQ ID NO: 59816 - DNA, 37 bp, Homo sapiens; identical to SEQ ID NO: 17342
  source 1..37: mol_type = genomic DNA

SEQ ID NO: 59817 - DNA, 48 bp, Homo sapiens; identical to SEQ ID NO: 18379
  source 1..48: mol_type = genomic DNA

SEQ ID NO: 59818 - DNA, 33 bp, Homo sapiens; identical to SEQ ID NO: 18417
  source 1..33: mol_type = genomic DNA

SEQ ID NO: 59819 - DNA, 34 bp, Homo sapiens; identical to SEQ ID NO: 18791
  source 1..34: mol_type = genomic DNA

SEQ ID NO: 59820 - DNA, 18 bp, Homo sapiens
  source 1..18: mol_type = genomic DNA
gggttcgattcccggtca

SEQ ID NO: 59821 - DNA, 34 bp, Homo sapiens; identical to SEQ ID NO: 19196
  source 1..34: mol_type = genomic DNA

SEQ ID NO: 59822 - DNA, 35 bp, Homo sapiens; identical to SEQ ID NO: 19221
  source 1..35: mol_type = genomic DNA

SEQ ID NO: 59823 - DNA, 16 bp, Homo sapiens
  source 1..16: mol_type = genomic DNA
gtcccttcgtggtcgc

SEQ ID NO: 59824 - DNA, 35 bp, Homo sapiens; identical to SEQ ID NO: 23054
  source 1..35: mol_type = genomic DNA

SEQ ID NO: 59825 - DNA, 24 bp, Homo sapiens
  source 1..24: mol_type = genomic DNA
taagttgcaatacttaatttctgc

SEQ ID NO: 59826 - DNA, 33 bp, Homo sapiens; identical to SEQ ID NO: 23655
  source 1..33: mol_type = genomic DNA

SEQ ID NO: 59827 - DNA, 33 bp, Homo sapiens; identical to SEQ ID NO: 23692
  source 1..33: mol_type = genomic DNA

SEQ ID NO: 59828 - DNA, 32 bp, Homo sapiens; identical to SEQ ID NO: 23721
  source 1..32: mol_type = genomic DNA

SEQ ID NO: 59829 - DNA, 21 bp, Homo sapiens
  source 1..21: mol_type = genomic DNA
tcaaagttaaattataggcta

SEQ ID NO: 59830 - DNA, 37 bp, Homo sapiens; identical to SEQ ID NO: 24900
  source 1..37: mol_type = genomic DNA

SEQ ID NO: 59831 - DNA, 28 bp, Homo sapiens
  source 1..28: mol_type = genomic DNA
tcccgggttcgatccccagcatctccac

SEQ ID NO: 59832 - DNA, 27 bp, Homo sapiens
  source 1..27: mol_type = genomic DNA
tcctgagttcgagcctcagagagggca

SEQ ID NO: 59833 - DNA, 26 bp, Homo sapiens
  source 1..26: mol_type = genomic DNA
tgaaaatgtttagacgggctcacatc

SEQ ID NO: 59834 - DNA, 45 bp, Homo sapiens; identical to SEQ ID NO: 28053
  source 1..45: mol_type = genomic DNA

SEQ ID NO: 59835 - DNA, 44 bp, Homo sapiens; identical to SEQ ID NO: 28348
  source 1..44: mol_type = genomic DNA

SEQ ID NO: 59836 - DNA, 35 bp, Homo sapiens; identical to SEQ ID NO: 28571
  source 1..35: mol_type = genomic DNA

SEQ ID NO: 59837 - DNA, 16 bp, Homo sapiens
  source 1..16: mol_type = genomic DNA
ttcggcgctctcaccg

SEQ ID NO: 59838 - DNA, 30 bp, Homo sapiens; identical to SEQ ID NO: 30647
  source 1..30: mol_type = genomic DNA

SEQ ID NO: 59839 - DNA, 26 bp, Homo sapiens
  source 1..26: mol_type = genomic DNA
tttgatagagtaaataataggagctt

SEQ ID NO: 59840 - DNA, 28 bp, Homo sapiens
  source 1..28: mol_type = genomic DNA
attggtcgtggttgtagtccgtgcgaga

SEQ ID NO: 59841 - DNA, 29 bp, Homo sapiens
  source 1..29: mol_type = genomic DNA
gatttcaacttaacttgaccgctctgacc

SEQ ID NO: 59842 - DNA, 24 bp, Homo sapiens
  source 1..24: mol_type = genomic DNA
gttcgattccccgacggggagcca

SEQ ID NO: 59843 - DNA, 19 bp, Homo sapiens
  source 1..19: mol_type = genomic DNA
ttaacttgaccgctctgac

SEQ ID NO: 59844 - DNA, 18 bp, Homo sapiens
  source 1..18: mol_type = genomic DNA
tccccagtacctccacca

SEQ ID NO: 59845 - DNA, 20 bp, Homo sapiens
  source 1..20: mol_type = genomic DNA
gatttcaacttaacttgacc

SEQ ID NO: 59846 - DNA, 24 bp, Homo sapiens
  source 1..24: mol_type = genomic DNA
gggggtatagctcagtggtagagc

SEQ ID NO: 59847 - DNA, 22 bp, Homo sapiens
  source 1..22: mol_type = genomic DNA
ggttcgattccccgacggggag

SEQ ID NO: 59848 - DNA, 25 bp, Homo sapiens
  source 1..25: mol_type = genomic DNA
ttcaacttaacttgaccgctctgac

SEQ ID NO: 59849 - DNA, 22 bp, Homo sapiens
  source 1..22: mol_type = genomic DNA
gttcgattcccggtcagggaac

SEQ ID NO: 59850 - DNA, 16 bp, Homo sapiens
  source 1..16: mol_type = genomic DNA
cccagcatctccacca

SEQ ID NO: 59851 - DNA, 17 bp, Homo sapiens
  source 1..17: mol_type = genomic DNA
attggtcgtggttgtag

SEQ ID NO: 59852 - DNA, 16 bp, Homo sapiens
  source 1..16: mol_type = genomic DNA
agactttttctctgac

SEQ ID NO: 59853 - DNA, 21 bp, Homo sapiens
  source 1..21: mol_type = genomic DNA
agcactctggactctgaatcc

SEQ ID NO: 59854 - DNA, 21 bp, Homo sapiens
  source 1..21: mol_type = genomic DNA
gtagtccgtgcgagaatacca

SEQ ID NO: 59855 - DNA, 25 bp, Homo sapiens
  source 1..25: mol_type = genomic DNA
tcgtatagtggttagtactctgcgt

SEQ ID NO: 59856 - DNA, 22 bp, Homo sapiens
  source 1..22: mol_type = genomic DNA
cttacgaccccttatttacccc

SEQ ID NO: 59857 - DNA, 25 bp, Homo sapiens
  source 1..25: mol_type = genomic DNA
tggtcgtggttgtagtccgtgcgag

SEQ ID NO: 59858 - DNA, 24 bp, Homo sapiens
  source 1..24: mol_type = genomic DNA
tggttaggattcggcgctctcacc

SEQ ID NO: 59859 - DNA, 25 bp, Homo sapiens
  source 1..25: mol_type = genomic DNA
ggctcacatcaccccataaacacca

SEQ ID NO: 59860 - DNA, 28 bp, Homo sapiens
  source 1..28: mol_type = genomic DNA
gtttccgtagtgtagcggttatcacatt

SEQ ID NO: 59861 - DNA, 28 bp, Homo sapiens
  source 1..28: mol_type = genomic DNA
cattggtcgtggttgtagtccgtgcgag

SEQ ID NO: 59862 - DNA, 28 bp, Homo sapiens
  source 1..28: mol_type = genomic DNA
gccgtgatcgtatagtggttagtactct

SEQ ID NO: 59863 - DNA, 25 bp, Homo sapiens
  source 1..25: mol_type = genomic DNA
tggttgtagtccgtgcgagaatacc

SEQ ID NO: 59864 - DNA, 25 bp, Homo sapiens
  source 1..25: mol_type = genomic DNA
tgccgtgatcgtatagtggttagta

SEQ ID NO: 59865 - DNA, 29 bp, Homo sapiens
  source 1..29: mol_type = genomic DNA
gattgtgaatctgacaacagaggcttacg

SEQ ID NO: 59866 - DNA, 18 bp, Homo sapiens
  source 1..18: mol_type = genomic DNA
aacatggctttctcacca

SEQ ID NO: 59867 - DNA, 29 bp, Homo sapiens
  source 1..29: mol_type = genomic DNA
tgccgtgatcgtatagtggttagtactct

SEQ ID NO: 59868 - DNA, 27 bp, Homo sapiens
  source 1..27: mol_type = genomic DNA
caggggttaggcctctttttaccacca

SEQ ID NO: 59869 - DNA, 16 bp, Homo sapiens
  source 1..16: mol_type = genomic DNA
gcatgggtggttcagt

SEQ ID NO: 59870 - DNA, 22 bp, Homo sapiens
  source 1..22: mol_type = genomic DNA
gttatacccttcccgtactacc

SEQ ID NO: 59871 - DNA, 18 bp, Homo sapiens
  source 1..18: mol_type = genomic DNA
cgaccccttatttacccc

SEQ ID NO: 59872 - DNA, 25 bp, Homo sapiens
  source 1..25: mol_type = genomic DNA
ttggttatacccttcccgtactacc

SEQ ID NO: 59873 - DNA, 19 bp, Homo sapiens
  source 1..19: mol_type = genomic DNA
ggccctatagctcaggggt

SEQ ID NO: 59874 - DNA, 30 bp, Homo sapiens; identical to SEQ ID NO: 10275
  source 1..30: mol_type = genomic DNA

SEQ ID NO: 59875 - DNA, 22 bp, Homo sapiens
  source 1..22: mol_type = genomic DNA
ctagcggttaggattcctggtt

SEQ ID NO: 59876 - DNA, 17 bp, Homo sapiens
  source 1..17: mol_type = genomic DNA
gttcttgtagttgaaat

SEQ ID NO: 59877 - DNA, 16 bp, Homo sapiens
  source 1..16: mol_type = genomic DNA
cctctttacagtgacc

SEQ ID NO: 59878 - DNA, 21 bp, Homo sapiens
  source 1..21: mol_type = genomic DNA
tagcggttaggattcctggtt

SEQ ID NO: 59879 - DNA, 29 bp, Homo sapiens
  source 1..29: mol_type = genomic DNA
gtccttgtagtataaactaatacaccagt

SEQ ID NO: 59880 - DNA, 25 bp, Homo sapiens
  source 1..25: mol_type = genomic DNA
gagcttaaacccccttatttctacc

SEQ ID NO: 59881 - DNA, 19 bp, Homo sapiens
  source 1..19: mol_type = genomic DNA
ggttcgattcccggtcagg

SEQ ID NO: 59882 - DNA, 23 bp, Homo sapiens
  source 1..23: mol_type = genomic DNA
ctcgcctgccacgcgggaggccc

SEQ ID NO: 59883 - DNA, 31 bp, Homo sapiens; identical to SEQ ID NO: 2233
  source 1..31: mol_type = genomic DNA

SEQ ID NO: 59884 - DNA, 27 bp, Homo sapiens
  source 1..27: mol_type = genomic DNA
ggagcttaaacccccttatttctacca

SEQ ID NO: 59885 - DNA, 26 bp, Homo sapiens
  source 1..26: mol_type = genomic DNA
attcggcgctctcaccgccgcggccc

SEQ ID NO: 59886 - DNA, 33 bp, Homo sapiens; identical to SEQ ID NO: 24474
  source 1..33: mol_type = genomic DNA

SEQ ID NO: 59887 - DNA, 31 bp, Homo sapiens; identical to SEQ ID NO: 9764
  source 1..31: mol_type = genomic DNA

SEQ ID NO: 59888 - DNA, 26 bp, Homo sapiens
  source 1..26: mol_type = genomic DNA
ggagcttaaacccccttatttctacc

SEQ ID NO: 59889 - DNA, 23 bp, Homo sapiens
  source 1..23: mol_type = genomic DNA
gttcgagccccacgttgggcgcc

SEQ ID NO: 59890 - DNA, 30 bp, Homo sapiens; identical to SEQ ID NO: 18425
  source 1..30: mol_type = genomic DNA

SEQ ID NO: 59891 - DNA, 24 bp, Homo sapiens
  source 1..24: mol_type = genomic DNA
cgtggttgtagtccgtgcgagaat

SEQ ID NO: 59892 - DNA, 18 bp, Homo sapiens
  source 1..18: mol_type = genomic DNA
aaaatgtttagacgggct

SEQ ID NO: 59893 - DNA, 17 bp, Homo sapiens
  source 1..17: mol_type = genomic DNA
ggttaggattcctggtt

SEQ ID NO: 59894 - DNA, 22 bp, Homo sapiens
  source 1..22: mol_type = genomic DNA
tcgtggttgtagtccgtgcgag

SEQ ID NO: 59895 - DNA, 33 bp, Homo sapiens; identical to SEQ ID NO: 2980
  source 1..33: mol_type = genomic DNA

SEQ ID NO: 59896 - DNA, 22 bp, Homo sapiens
  source 1..22: mol_type = genomic DNA
ttaaccgaaaggttggtggttc

SEQ ID NO: 59897 - DNA, 36 bp, Homo sapiens; identical to SEQ ID NO: 22459
  source 1..36: mol_type = genomic DNA

SEQ ID NO: 59898 - DNA, 26 bp, Homo sapiens
  source 1..26: mol_type = genomic DNA
tggtagaattctcgcctgccacgcgg

SEQ ID NO: 59899 - DNA, 33 bp, Homo sapiens; identical to SEQ ID NO: 20366
  source 1..33: mol_type = genomic DNA

SEQ ID NO: 59900 - DNA, 17 bp, Homo sapiens
  source 1..17: mol_type = genomic DNA
ttcaaaaaagagtacca

SEQ ID NO: 59901 - DNA, 28 bp, Homo sapiens
  source 1..28: mol_type = genomic DNA
atgttggttatacccttcccgtactacc

SEQ ID NO: 59902 - DNA, 31 bp, Homo sapiens; identical to SEQ ID NO: 23440
  source 1..31: mol_type = genomic DNA

SEQ ID NO: 59903 - DNA, 26 bp, Homo sapiens
  source 1..26: mol_type = genomic DNA
gaggcttacgaccccttatttacccc

SEQ ID NO: 59904 - DNA, 24 bp, Homo sapiens
  source 1..24: mol_type = genomic DNA
ggttcgattccttccttttttgcc

SEQ ID NO: 59905 - DNA, 16 bp, Homo sapiens
  source 1..16: mol_type = genomic DNA
ctagctcagtcggtag

SEQ ID NO: 59906 - DNA, 17 bp, Homo sapiens
  source 1..17: mol_type = genomic DNA
gggggtatagctcagtg

SEQ ID NO: 59907 - DNA, 19 bp, Homo sapiens
  source 1..19: mol_type = genomic DNA
aacacctctttacagtgac

SEQ ID NO: 59908 - DNA, 17 bp, Homo sapiens
  source 1..17: mol_type = genomic DNA
gctctcaccgccgcggc

SEQ ID NO: 59909 - DNA, 22 bp, Homo sapiens
  source 1..22: mol_type = genomic DNA
gttgcaatacttaatttctgcc

SEQ ID NO: 59910 - DNA, 19 bp, Homo sapiens
  source 1..19: mol_type = genomic DNA
caagaactgctaactcatg

SEQ ID NO: 59911 - DNA, 31 bp, Homo sapiens; identical to SEQ ID NO: 9621
  source 1..31: mol_type = genomic DNA

SEQ ID NO: 59912 - DNA, 24 bp, Homo sapiens
  source 1..24: mol_type = genomic DNA
gctttgcacgtatgaggccccggg

SEQ ID NO: 59913 - DNA, 17 bp, Homo sapiens
  source 1..17: mol_type = genomic DNA
ctttttccaaggacacc

SEQ ID NO: 59914 - DNA, 20 bp, Homo sapiens
  source 1..20: mol_type = genomic DNA
ctgtcacgcgggagaccggg

SEQ ID NO: 59915 - DNA, 23 bp, Homo sapiens
  source 1..23: mol_type = genomic DNA
gtggggttttgcagtccttacca

SEQ ID NO: 59916 - DNA, 25 bp, Homo sapiens
  source 1..25: mol_type = genomic DNA
aggcttacgaccccttatttacccc

SEQ ID NO: 59917 - DNA, 20 bp, Homo sapiens
  source 1..20: mol_type = genomic DNA
taaacccccttatttctacc

SEQ ID NO: 59918 - DNA, 31 bp, Homo sapiens; identical to SEQ ID NO: 6209
  source 1..31: mol_type = genomic DNA

SEQ ID NO: 59919 - DNA, 16 bp, Homo sapiens
  source 1..16: mol_type = genomic DNA
gttcgattccccgacg

SEQ ID NO: 59920 - DNA, 22 bp, Homo sapiens
  source 1..22: mol_type = genomic DNA
caacttacacttaggagatttc

SEQ ID NO: 59921 - DNA, 21 bp, Homo sapiens
  source 1..21: mol_type = genomic DNA
aagaactgctaactcatgccc

SEQ ID NO: 59922 - DNA, 20 bp, Homo sapiens
  source 1..20: mol_type = genomic DNA
cattggtggttcagtggtag

SEQ ID NO: 59923 - DNA, 28 bp, Homo sapiens
  source 1..28: mol_type = genomic DNA
acaggggttaggcctctttttaccacca

SEQ ID NO: 59924 - DNA, 19 bp, Homo sapiens
  source 1..19: mol_type = genomic DNA
ggtggagttaaagactttt

SEQ ID NO: 59925 - DNA, 20 bp, Homo sapiens
  source 1..20: mol_type = genomic DNA
gctgagtgaagcattggact

SEQ ID NO: 59926 - DNA, 19 bp, Homo sapiens
  source 1..19: mol_type = genomic DNA
tcaaacctgccggggcttc

SEQ ID NO: 59927 - DNA, 30 bp, Homo sapiens; identical to SEQ ID NO: 10904
  source 1..30: mol_type = genomic DNA

SEQ ID NO: 59928 - DNA, 17 bp, Homo sapiens
  source 1..17: mol_type = genomic DNA
gtatgattctcggtttg

SEQ ID NO: 59929 - DNA, 34 bp, Homo sapiens; identical to SEQ ID NO: 9767
  source 1..34: mol_type = genomic DNA

SEQ ID NO: 59930 - DNA, 38 bp, Homo sapiens; identical to SEQ ID NO: 24479
  source 1..38: mol_type = genomic DNA

SEQ ID NO: 59931 - DNA, 17 bp, Homo sapiens
  source 1..17: mol_type = genomic DNA
cttaggtcgctggttcg

SEQ ID NO: 59932 - DNA, 22 bp, Homo sapiens
  source 1..22: mol_type = genomic DNA
gttgatgcagagtggggttttg

SEQ ID NO: 59933 - DNA, 38 bp, Homo sapiens; identical to SEQ ID NO: 16645
  source 1..38: mol_type = genomic DNA

SEQ ID NO: 59934 - DNA, 28 bp, Homo sapiens
  source 1..28: mol_type = genomic DNA
gacaggggttaggcctctttttaccacc

SEQ ID NO: 59935 - DNA, 19 bp, Homo sapiens
  source 1..19: mol_type = genomic DNA
gtggttatcacgtctgctt

SEQ ID NO: 59936 - DNA, 37 bp, Homo sapiens; identical to SEQ ID NO: 24478
  source 1..37: mol_type = genomic DNA

SEQ ID NO: 59937 - DNA, 24 bp, Homo sapiens
  source 1..24: mol_type = genomic DNA
tgggttcgattctcatagtcctag

SEQ ID NO: 59938 - DNA, 41 bp, Homo sapiens; identical to SEQ ID NO: 215
  source 1..41: mol_type = genomic DNA

SEQ ID NO: 59939 - DNA, 40 bp, Homo sapiens; identical to SEQ ID NO: 214
  source 1..40: mol_type = genomic DNA

SEQ ID NO: 59940 - DNA, 28 bp, Homo sapiens
  source 1..28: mol_type = genomic DNA
tcatatcattggtcgtggttgtagtccg

SEQ ID NO: 59941 - DNA, 25 bp, Homo sapiens
  source 1..25: mol_type = genomic DNA
aagttgcaatacttaatttctgcca

SEQ ID NO: 59942 - DNA, 20 bp, Homo sapiens
  source 1..20: mol_type = genomic DNA
gcctgtcacgcgggagaccg

SEQ ID NO: 59943 - DNA, 22 bp, Homo sapiens
  source 1..22: mol_type = genomic DNA
ttcgatcccgggtttcggcacc

SEQ ID NO: 59944 - DNA, 23 bp, Homo sapiens
  source 1..23: mol_type = genomic DNA
gttcaagtccctgttcgggcgcc

SEQ ID NO: 59945 - DNA, 24 bp, Homo sapiens
  source 1..24: mol_type = genomic DNA
ccctggtggtctagtggttaggat

SEQ ID NO: 59946 - DNA, 40 bp, Homo sapiens; identical to SEQ ID NO: 25710
  source 1..40: mol_type = genomic DNA

SEQ ID NO: 59947 - DNA, 19 bp, Homo sapiens
  source 1..19: mol_type = genomic DNA
tcgatcccgggtttcggca

SEQ ID NO: 59948 - DNA, 19 bp, Homo sapiens
  source 1..19: mol_type = genomic DNA
aaacccccttatttctacc

SEQ ID NO: 59949 - DNA, 19 bp, Homo sapiens
  source 1..19: mol_type = genomic DNA
aacaacatggctttctcac

SEQ ID NO: 59950 - DNA, 18 bp, Homo sapiens
  source 1..18: mol_type = genomic DNA
attggtggttcagtggta

SEQ ID NO: 59951 - DNA, 32 bp, Homo sapiens; identical to SEQ ID NO: 18449
  source 1..32: mol_type = genomic DNA

SEQ ID NO: 59952 - DNA, 36 bp, Homo sapiens; identical to SEQ ID NO: 8591
  source 1..36: mol_type = genomic DNA

SEQ ID NO: 59953 - DNA, 16 bp, Homo sapiens
  source 1..16: mol_type = genomic DNA
atcccaccctcgtcgc

SEQ ID NO: 59954 - DNA, 28 bp, Homo sapiens
  source 1..28: mol_type = genomic DNA
cagaggcttacgaccccttatttacccc

SEQ ID NO: 59955 - DNA, 23 bp, Homo sapiens
  source 1..23: mol_type = genomic DNA
gttcgagtcccatctggggtgcc

SEQ ID NO: 59956 - DNA, 47 bp, Homo sapiens; identical to SEQ ID NO: 10366
  source 1..47: mol_type = genomic DNA

SEQ ID NO: 59957 - DNA, 19 bp, Homo sapiens
  source 1..19: mol_type = genomic DNA
gagaaccaacacctcttta

SEQ ID NO: 59958 - DNA, 22 bp, Homo sapiens
  source 1..22: mol_type = genomic DNA
ggggattagctcaaatggtaga

SEQ ID NO: 59959 - DNA, 41 bp, Homo sapiens; identical to SEQ ID NO: 23475
  source 1..41: mol_type = genomic DNA

SEQ ID NO: 59960 - DNA, 26 bp, Homo sapiens
  source 1..26: mol_type = genomic DNA
caacttacacttaggagatttcaact

SEQ ID NO: 59961 - DNA, 40 bp, Homo sapiens; identical to SEQ ID NO: 30354
  source 1..40: mol_type = genomic DNA

SEQ ID NO: 59962 - DNA, 19 bp, Homo sapiens
  source 1..19: mol_type = genomic DNA
cataatctgaaggtcctga

SEQ ID NO: 59963 - DNA, 16 bp, Homo sapiens
  source 1..16: mol_type = genomic DNA
atctcggtgggacctc

SEQ ID NO: 59964 - DNA, 24 bp, Homo sapiens
  source 1..24: mol_type = genomic DNA
cttaggagatttcaacttaacttg

SEQ ID NO: 59965 - DNA, 41 bp, Homo sapiens; identical to SEQ ID NO: 23029
  source 1..41: mol_type = genomic DNA

SEQ ID NO: 59966 - DNA, 21 bp, Homo sapiens
  source 1..21: mol_type = genomic DNA
tcaggatggccgagcggtcta

SEQ ID NO: 59967 - DNA, 19 bp, Homo sapiens
  source 1..19: mol_type = genomic DNA
aagtcccattggtctagcc

SEQ ID NO: 59968 - DNA, 22 bp, Homo sapiens
  source 1..22: mol_type = genomic DNA
atgtctaacaacatggctttct

SEQ ID NO: 59969 - DNA, 17 bp, Homo sapiens
  source 1..17: mol_type = genomic DNA
tcaccgccgcggcccgg

SEQ ID NO: 59970 - DNA, 26 bp, Homo sapiens
  source 1..26: mol_type = genomic DNA
tccattggggtttccccgcgcaggtt

SEQ ID NO: 59971 - DNA, 25 bp, Homo sapiens
  source 1..25: mol_type = genomic DNA
tcggtagagcatgggactcttaatc

SEQ ID NO: 59972 - DNA, 43 bp, Homo sapiens; identical to SEQ ID NO: 30593
  source 1..43: mol_type = genomic DNA

SEQ ID NO: 59973 - DNA, 26 bp, Homo sapiens
  source 1..26: mol_type = genomic DNA
agtcggtagagcatgagactcttaat

SEQ ID NO: 59974 - DNA, 18 bp, Homo sapiens
  source 1..18: mol_type = genomic DNA
ctgcgtgttcgaatcacg

SEQ ID NO: 59975 - DNA, 19 bp, Homo sapiens
  source 1..19: mol_type = genomic DNA
gggtatgattctcgcttcg

SEQ ID NO: 59976 - DNA, 42 bp, Homo sapiens; identical to SEQ ID NO: 216
  source 1..42: mol_type = genomic DNA

SEQ ID NO: 59977 - DNA, 17 bp, Homo sapiens
  source 1..17: mol_type = genomic DNA
aagacaggggttaggcc

SEQ ID NO: 59978 - DNA, 30 bp, Homo sapiens; identical to SEQ ID NO: 2977
  source 1..30: mol_type = genomic DNA

SEQ ID NO: 59979 - DNA, 43 bp, Homo sapiens; identical to SEQ ID NO: 17413
  source 1..43: mol_type = genomic DNA

SEQ ID NO: 59980 - DNA, 22 bp, Homo sapiens
  source 1..22: mol_type = genomic DNA
gtctcataatctgaaggtcgtg

SEQ ID NO: 59981 - DNA, 25 bp, Homo sapiens
  source 1..25: mol_type = genomic DNA
tctgacaacagaggcttacgacccc

SEQ ID NO: 59982 - DNA, 27 bp, Homo sapiens
  source 1..27: mol_type = genomic DNA
tgcccccatgtctaacaacatggcttt

SEQ ID NO: 59983 - DNA, 28 bp, Homo sapiens
  source 1..28: mol_type = genomic DNA
ttcggcgctctcaccgccgcggcccggg

SEQ ID NO: 59984 - DNA, 33 bp, Homo sapiens; identical to SEQ ID NO: 949
  source 1..33: mol_type = genomic DNA

SEQ ID NO: 59985 - DNA, 18 bp, Homo sapiens
  source 1..18: mol_type = genomic DNA
aatggatagcgcattgga

SEQ ID NO: 59986 - DNA, 29 bp, Homo sapiens
  source 1..29: mol_type = genomic DNA
actaagtgtttgtgggtttaagtcccatt

SEQ ID NO: 59987 - DNA, 46 bp, Homo sapiens; identical to SEQ ID NO: 3398
  source 1..46: mol_type = genomic DNA

SEQ ID NO: 59988 - DNA, 23 bp, Homo sapiens
  source 1..23: mol_type = genomic DNA
cgctctcaccgccgcggcccggg

SEQ ID NO: 59989 - DNA, 46 bp, Homo sapiens; identical to SEQ ID NO: 17150
  source 1..46: mol_type = genomic DNA

SEQ ID NO: 59990 - DNA, 18 bp, Homo sapiens
  source 1..18: mol_type = genomic DNA
gcggcccgggttcgactc

SEQ ID NO: 59991 - DNA, 34 bp, Homo sapiens; identical to SEQ ID NO: 18726
  source 1..34: mol_type = genomic DNA

SEQ ID NO: 59992 - DNA, 35 bp, Homo sapiens; identical to SEQ ID NO: 18739
  source 1..35: mol_type = genomic DNA

SEQ ID NO: 59993 - DNA, 37 bp, Homo sapiens; identical to SEQ ID NO: 22611
  source 1..37: mol_type = genomic DNA

SEQ ID NO: 59994 - DNA, 23 bp, Homo sapiens
  source 1..23: mol_type = genomic DNA
tcaggatggccgagtggtctaag

SEQ ID NO: 59995 - DNA, 26 bp, Homo sapiens
  source 1..26: mol_type = genomic DNA
tgcgtgttcaagtcacgtcggggtca

SEQ ID NO: 59996 - DNA, 20 bp, Homo sapiens
  source 1..20: mol_type = genomic DNA
ttcgagccccagtggaacca

SEQ ID NO: 59997 - DNA, 27 bp, Homo sapiens
  source 1..27: mol_type = genomic DNA
tttgacaacattcaaaaaagagtacca

SEQ ID NO: 59998 - DNA, 24 bp, Homo sapiens
  source 1..24: mol_type = genomic DNA
ggtagcgtggccgagcggtctaag

SEQ ID NO: 59999 - DNA, 17 bp, Homo sapiens
  source 1..17: mol_type = genomic DNA
gcgccgctggtgtagtg

SEQ ID NO: 60000 - DNA, 19 bp, Homo sapiens
  source 1..19: mol_type = genomic DNA
tcgtggttgtagtccgtgc

SEQ ID NO: 60001 - DNA, 16 bp, Homo sapiens
  source 1..16: mol_type = genomic DNA
gaaaaagtcatggagg

SEQ ID NO: 60002 - DNA, 18 bp, Homo sapiens
  source 1..18: mol_type = genomic DNA
gtcaggatggccgagtgg

SEQ ID NO: 60003 - DNA, 23 bp, Homo sapiens
  source 1..23: mol_type = genomic DNA
gtttaagtcccattggtctagcc

SEQ ID NO: 60004 - DNA, 16 bp, Homo sapiens
  source 1..16: mol_type = genomic DNA
cggtagagcatgggac

SEQ ID NO: 60005 - DNA, 17 bp, Homo sapiens
  source 1..17: mol_type = genomic DNA
taggatggggtgtgata

SEQ ID NO: 60006 - DNA, 18 bp, Homo sapiens
  source 1..18: mol_type = genomic DNA
aacccccttatttctacc

SEQ ID NO: 60007 - DNA, 17 bp, Homo sapiens
  source 1..17: mol_type = genomic DNA
atcagattgtgaatctg

SEQ ID NO: 60008 - DNA, 17 bp, Homo sapiens
  source 1..17: mol_type = genomic DNA
gtcaggatggccgagcg

SEQ ID NO: 60009 - DNA, 22 bp, Homo sapiens
  source 1..22: mol_type = genomic DNA
ggttccatagtgtagtggttat

SEQ ID NO: 60010 - DNA, 17 bp, Homo sapiens
  source 1..17: mol_type = genomic DNA
gttcgattcccggtcag

SEQ ID NO: 60011 - DNA, 41 bp, Homo sapiens; identical to SEQ ID NO: 23351
  source 1..41: mol_type = genomic DNA

SEQ ID NO: 60012 - DNA, 31 bp, Homo sapiens; identical to SEQ ID NO: 12560
  source 1..31: mol_type = genomic DNA

SEQ ID NO: 60013 - DNA, 26 bp, Homo sapiens
  source 1..26: mol_type = genomic DNA
ccgggttcgactcccggtgtgggaac

SEQ ID NO: 60014 - DNA, 43 bp, Homo sapiens; identical to SEQ ID NO: 25210
  source 1..43: mol_type = genomic DNA

SEQ ID NO: 60015 - DNA, 26 bp, Homo sapiens
  source 1..26: mol_type = genomic DNA
agggattgtgggttcgagtcccatct

SEQ ID NO: 60016 - DNA, 37 bp, Homo sapiens; identical to SEQ ID NO: 3146
  source 1..37: mol_type = genomic DNA

SEQ ID NO: 60017 - DNA, 36 bp, Homo sapiens; identical to SEQ ID NO: 2928
  source 1..36: mol_type = genomic DNA

SEQ ID NO: 60018 - DNA, 42 bp, Homo sapiens; identical to SEQ ID NO: 25712
  source 1..42: mol_type = genomic DNA

SEQ ID NO: 60019 - DNA, 37 bp, Homo sapiens; identical to SEQ ID NO: 11954
  source 1..37: mol_type = genomic DNA

SEQ ID NO: 60020 - DNA, 40 bp, Homo sapiens; identical to SEQ ID NO: 24860
  source 1..40: mol_type = genomic DNA

SEQ ID NO: 60021 - DNA, 37 bp, Homo sapiens; identical to SEQ ID NO: 16701
  source 1..37: mol_type = genomic DNA

SEQ ID NO: 60022 - DNA, 36 bp, Homo sapiens; identical to SEQ ID NO: 12244
  source 1..36: mol_type = genomic DNA

SEQ ID NO: 60023 - DNA, 16 bp, Homo sapiens
  source 1..16: mol_type = genomic DNA
gttcgattcccgggcg

SEQ ID NO: 60024 - DNA, 38 bp, Homo sapiens; identical to SEQ ID NO: 931
  source 1..38: mol_type = genomic DNA

SEQ ID NO: 60025 - DNA, 43 bp, Homo sapiens; identical to SEQ ID NO: 15425
  source 1..43: mol_type = genomic DNA

SEQ ID NO: 60026 - DNA, 38 bp, Homo sapiens; identical to SEQ ID NO: 11955
  source 1..38: mol_type = genomic DNA

SEQ ID NO: 60027 - DNA, 35 bp, Homo sapiens; identical to SEQ ID NO: 17115
  source 1..35: mol_type = genomic DNA

SEQ ID NO: 60028 - DNA, 38 bp, Homo sapiens; identical to SEQ ID NO: 7460
  source 1..38: mol_type = genomic DNA

SEQ ID NO: 60029 - DNA, 38 bp, Homo sapiens; identical to SEQ ID NO: 28874
  source 1..38: mol_type = genomic DNA

SEQ ID NO: 60030 - DNA, 36 bp, Homo sapiens; identical to SEQ ID NO: 12228
  source 1..36: mol_type = genomic DNA

SEQ ID NO: 60031 - DNA, 16 bp, Homo sapiens
  source 1..16: mol_type = genomic DNA
tcccgggcggcgcacc

SEQ ID NO: 60032 - DNA, 32 bp, Homo sapiens; identical to SEQ ID NO: 16561
  source 1..32: mol_type = genomic DNA

SEQ ID NO: 60033 - DNA, 32 bp, Homo sapiens; identical to SEQ ID NO: 11098
  source 1..32: mol_type = genomic DNA

SEQ ID NO: 60034 - DNA, 38 bp, Homo sapiens; identical to SEQ ID NO: 27471
  source 1..38: mol_type = genomic DNA

SEQ ID NO: 60035 - DNA, 20 bp, Homo sapiens
  source 1..20: mol_type = genomic DNA
agtggttagtactctgcgtt

SEQ ID NO: 60036 - DNA, 24 bp, Homo sapiens
  source 1..24: mol_type = genomic DNA
gcgttcgattcccggtcagggaac

SEQ ID NO: 60037 - DNA, 21 bp, Homo sapiens
  source 1..21: mol_type = genomic DNA
ctagtggttaggattcggcgc

SEQ ID NO: 60038 - DNA, 23 bp, Homo sapiens
  source 1..23: mol_type = genomic DNA
ctagtggttaggattcggcgctc

SEQ ID NO: 60039 - DNA, 39 bp, Homo sapiens; identical to SEQ ID NO: 1484
  source 1..39: mol_type = genomic DNA

SEQ ID NO: 60040 - DNA, 36 bp, Homo sapiens; identical to SEQ ID NO: 27004
  source 1..36: mol_type = genomic DNA

SEQ ID NO: 60041 - DNA, 36 bp, Homo sapiens; identical to SEQ ID NO: 14223
  source 1..36: mol_type = genomic DNA

SEQ ID NO: 60042 - DNA, 37 bp, Homo sapiens; identical to SEQ ID NO: 17052
  source 1..37: mol_type = genomic DNA

SEQ ID NO: 60043 - DNA, 33 bp, Homo sapiens; identical to SEQ ID NO: 16835
  source 1..33: mol_type = genomic DNA

SEQ ID NO: 60044 - DNA, 36 bp, Homo sapiens; identical to SEQ ID NO: 3161
  source 1..36: mol_type = genomic DNA

SEQ ID NO: 60045 - DNA, 39 bp, Homo sapiens; identical to SEQ ID NO: 3100
  source 1..39: mol_type = genomic DNA

SEQ ID NO: 60046 - DNA, 38 bp, Homo sapiens; identical to SEQ ID NO: 3176
  source 1..38: mol_type = genomic DNA

SEQ ID NO: 60047 - DNA, 35 bp, Homo sapiens; identical to SEQ ID NO: 12243
  source 1..35: mol_type = genomic DNA

SEQ ID NO: 60048 - DNA, 34 bp, Homo sapiens; identical to SEQ ID NO: 13539
  source 1..34: mol_type = genomic DNA

SEQ ID NO: 60049 - DNA, 31 bp, Homo sapiens; identical to SEQ ID NO: 17081
  source 1..31: mol_type = genomic DNA

SEQ ID NO: 60050 - DNA, 37 bp, Homo sapiens; identical to SEQ ID NO: 3162
  source 1..37: mol_type = genomic DNA

SEQ ID NO: 60051 - DNA, 33 bp, Homo sapiens; identical to SEQ ID NO: 12012
  source 1..33: mol_type = genomic DNA

SEQ ID NO: 60052 - DNA, 34 bp, Homo sapiens; identical to SEQ ID NO: 11951
  source 1..34: mol_type = genomic DNA

SEQ ID NO: 60053 - DNA, 22 bp, Homo sapiens
  source 1..22: mol_type = genomic DNA
cggaagcgtgctgggcccataa

SEQ ID NO: 60054 - DNA, 17 bp, Homo sapiens
  source 1..17: mol_type = genomic DNA
tctcgctggggcctcca

SEQ ID NO: 60055 - DNA, 17 bp, Homo sapiens
  source 1..17: mol_type = genomic DNA
cccgggcggaaacacca

SEQ ID NO: 60056 - DNA, 38 bp, Homo sapiens; identical to SEQ ID NO: 33911
  source 1..38: mol_type = genomic DNA

SEQ ID NO: 60057 - DNA, 25 bp, Homo sapiens
  source 1..25: mol_type = genomic DNA
gcgggttcgaaccccgtccgtgcct

SEQ ID NO: 60058 - DNA, 29 bp, Homo sapiens
  source 1..29: mol_type = genomic DNA
gtcgctggttcgattccggctcgaaggac

SEQ ID NO: 60059 - DNA, 27 bp, Homo sapiens
  source 1..27: mol_type = genomic DNA
aggcggcccgggttcgactcccggtgt

SEQ ID NO: 60060 - DNA, 22 bp, Homo sapiens
  source 1..22: mol_type = genomic DNA
gggttcgactcccggtatggga

SEQ ID NO: 60061 - DNA, 19 bp, Homo sapiens
  source 1..19: mol_type = genomic DNA
atggataaggcattggcct

SEQ ID NO: 60062 - DNA, 27 bp, Homo sapiens
  source 1..27: mol_type = genomic DNA
tgagggttcgaatcccttcgtggttgc

SEQ ID NO: 60063 - DNA, 17 bp, Homo sapiens
  source 1..17: mol_type = genomic DNA
cagagtggcgcagcgga

SEQ ID NO: 60064 - DNA, 26 bp, Homo sapiens
  source 1..26: mol_type = genomic DNA
cctcggttcgaatccgagtcacggca

SEQ ID NO: 60065 - DNA, 21 bp, Homo sapiens
  source 1..21: mol_type = genomic DNA
gcaatggatagcgcattggac

SEQ ID NO: 60066 - DNA, 40 bp, Homo sapiens; identical to SEQ ID NO: 11506
  source 1..40: mol_type = genomic DNA

SEQ ID NO: 60067 - DNA, 31 bp, Homo sapiens; identical to SEQ ID NO: 10480
  source 1..31: mol_type = genomic DNA

SEQ ID NO: 60068 - DNA, 16 bp, Homo sapiens
  source 1..16: mol_type = genomic DNA
ggttaaggcattggac

SEQ ID NO: 60069 - DNA, 37 bp, Homo sapiens; identical to SEQ ID NO: 19938
  source 1..37: mol_type = genomic DNA

SEQ ID NO: 60070 - DNA, 24 bp, Homo sapiens
  source 1..24: mol_type = genomic DNA
cgggttcgactcccggtatgggaa

SEQ ID NO: 60071 - DNA, 30 bp, Homo sapiens; identical to SEQ ID NO: 1566
  source 1..30: mol_type = genomic DNA

SEQ ID NO: 60072 - DNA, 38 bp, Homo sapiens; identical to SEQ ID NO: 33917
  source 1..38: mol_type = genomic DNA

SEQ ID NO: 60073 - DNA, 31 bp, Homo sapiens; identical to SEQ ID NO: 31615
  source 1..31: mol_type = genomic DNA

SEQ ID NO: 60074 - DNA, 18 bp, Homo sapiens
  source 1..18: mol_type = genomic DNA
aaccccactcctggtacc

SEQ ID NO: 60075 - DNA, 36 bp, Homo sapiens; identical to SEQ ID NO: 11790
  source 1..36: mol_type = genomic DNA

SEQ ID NO: 60076 - DNA, 28 bp, Homo sapiens
  source 1..28: mol_type = genomic DNA
ttgagggttcgaatcccttcgtggttgc

SEQ ID NO: 60077 - DNA, 45 bp, Homo sapiens; identical to SEQ ID NO: 32206
  source 1..45: mol_type = genomic DNA

SEQ ID NO: 60078 - DNA, 25 bp, Homo sapiens
  source 1..25: mol_type = genomic DNA
aggcggcccgggttcgactcccggt

SEQ ID NO: 60079 - DNA, 20 bp, Homo sapiens
  source 1..20: mol_type = genomic DNA
tcgaatcccagtagagcctc

SEQ ID NO: 60080 - DNA, 26 bp, Homo sapiens
  source 1..26: mol_type = genomic DNA
ctggttcgatcccgggtttcggcacc

SEQ ID NO: 60081 - DNA, 32 bp, Homo sapiens; identical to SEQ ID NO: 17569
  source 1..32: mol_type = genomic DNA

SEQ ID NO: 60082 - DNA, 34 bp, Homo sapiens; identical to SEQ ID NO: 30117
  source 1..34: mol_type = genomic DNA

SEQ ID NO: 60083 - DNA, 29 bp, Homo sapiens
  source 1..29: mol_type = genomic DNA
aggatggggtgtgataggtggcacggaga

SEQ ID NO: 60084 - DNA, 25 bp, Homo sapiens
  source 1..25: mol_type = genomic DNA
cgtgttcaaatcacgtcggggtcac

SEQ ID NO: 60085 - DNA, 41 bp, Homo sapiens; identical to SEQ ID NO: 18202
  source 1..41: mol_type = genomic DNA

SEQ ID NO: 60086 - DNA, 16 bp, Homo sapiens
  source 1..16: mol_type = genomic DNA
ggtagagcagaggact

SEQ ID NO: 60087 - DNA, 25 bp, Homo sapiens
  source 1..25: mol_type = genomic DNA
cgcggcccgggttcgattcccggtc

SEQ ID NO: 60088 - DNA, 29 bp, Homo sapiens
  source 1..29: mol_type = genomic DNA
gcgtgggttcgaatcccaccttcgtcgcc

SEQ ID NO: 60089 - DNA, 33 bp, Homo sapiens; identical to SEQ ID NO: 20345
  source 1..33: mol_type = genomic DNA

SEQ ID NO: 60090 - DNA, 28 bp, Homo sapiens
  source 1..28: mol_type = genomic DNA
cgcagaaggtcctgggttcgagccccag

SEQ ID NO: 60091 - DNA, 32 bp, Homo sapiens; identical to SEQ ID NO: 12458
  source 1..32: mol_type = genomic DNA

SEQ ID NO: 60092 - DNA, 37 bp, Homo sapiens; identical to SEQ ID NO: 36634
  source 1..37: mol_type = genomic DNA

SEQ ID NO: 60093 - DNA, 31 bp, Homo sapiens; identical to SEQ ID NO: 38652
  source 1..31: mol_type = genomic DNA

SEQ ID NO: 60094 - DNA, 32 bp, Homo sapiens; identical to SEQ ID NO: 5157
  source 1..32: mol_type = genomic DNA

SEQ ID NO: 60095 - DNA, 16 bp, Homo sapiens
  source 1..16: mol_type = genomic DNA
cgttcggctgttaacc

SEQ ID NO: 60096 - DNA, 43 bp, Homo sapiens; identical to SEQ ID NO: 41033
  source 1..43: mol_type = genomic DNA

SEQ ID NO: 60097 - DNA, 32 bp, Homo sapiens; identical to SEQ ID NO: 8225
  source 1..32: mol_type = genomic DNA

SEQ ID NO: 60098 - DNA, 32 bp, Homo sapiens; identical to SEQ ID NO: 3777
  source 1..32: mol_type = genomic DNA

SEQ ID NO: 60099 - DNA, 23 bp, Homo sapiens
  source 1..23: mol_type = genomic DNA
agcagcttcaaacctgccggggc

SEQ ID NO: 60100 - DNA, 16 bp, Homo sapiens
  source 1..16: mol_type = genomic DNA
ggttcaaatccgggtg

SEQ ID NO: 60101 - DNA, 33 bp, Homo sapiens; identical to SEQ ID NO: 12208
  source 1..33: mol_type = genomic DNA

SEQ ID NO: 60102 - DNA, 25 bp, Homo sapiens
  source 1..25: mol_type = genomic DNA
cggagaattttggattctcagggat

SEQ ID NO: 60103 - DNA, 26 bp, Homo sapiens
  source 1..26: mol_type = genomic DNA
ttaaccgaaaggttggtggttcgagc

SEQ ID NO: 60104 - DNA, 28 bp, Homo sapiens
  source 1..28: mol_type = genomic DNA
agctcacaagaactgctaactcatgccc

SEQ ID NO: 60105 - DNA, 43 bp, Homo sapiens; identical to SEQ ID NO: 35270
  source 1..43: mol_type = genomic DNA

SEQ ID NO: 60106 - DNA, 47 bp, Homo sapiens; identical to SEQ ID NO: 11328
  source 1..47: mol_type = genomic DNA

SEQ ID NO: 60107 - DNA, 29 bp, Homo sapiens
  source 1..29: mol_type = genomic DNA
cgcgggaggcccgggttcgattcccggcc

SEQ ID NO: 60108 - DNA, 24 bp, Homo sapiens
  source 1..24: mol_type = genomic DNA
ggctgttaaccgaaaggttggtgg

SEQ ID NO: 60109 - DNA, 35 bp, Homo sapiens; identical to SEQ ID NO: 9089
  source 1..35: mol_type = genomic DNA

SEQ ID NO: 60110 - DNA, 38 bp, Homo sapiens; identical to SEQ ID NO: 9926
  source 1..38: mol_type = genomic DNA

SEQ ID NO: 60111 - DNA, 46 bp, Homo sapiens; identical to SEQ ID NO: 14304
  source 1..46: mol_type = genomic DNA

SEQ ID NO: 60112 - DNA, 26 bp, Homo sapiens
  source 1..26: mol_type = genomic DNA
gcggaagcgtgctgggcccataaccc

SEQ ID NO: 60113 - DNA, 37 bp, Homo sapiens; identical to SEQ ID NO: 919
  source 1..37: mol_type = genomic DNA

SEQ ID NO: 60114 - DNA, 30 bp, Homo sapiens; identical to SEQ ID NO: 5130
  source 1..30: mol_type = genomic DNA

SEQ ID NO: 60115 - DNA, 36 bp, Homo sapiens; identical to SEQ ID NO: 29983
  source 1..36: mol_type = genomic DNA

SEQ ID NO: 60116 - DNA, 47 bp, Homo sapiens; identical to SEQ ID NO: 24606
  source 1..47: mol_type = genomic DNA

SEQ ID NO: 60117 - DNA, 35 bp, Homo sapiens; identical to SEQ ID NO: 5027
  source 1..35: mol_type = genomic DNA

SEQ ID NO: 60118 - DNA, 31 bp, Homo sapiens; identical to SEQ ID NO: 27918
  source 1..31: mol_type = genomic DNA

SEQ ID NO: 60119 - DNA, 30 bp, Homo sapiens; identical to SEQ ID NO: 1632
  source 1..30: mol_type = genomic DNA

SEQ ID NO: 60120 - DNA, 29 bp, Homo sapiens
  source 1..29: mol_type = genomic DNA
aaaatgttggttatacccttcccgtacta

SEQ ID NO: 60121 - DNA, 31 bp, Homo sapiens; identical to SEQ ID NO: 2705
  source 1..31: mol_type = genomic DNA

SEQ ID NO: 60122 - DNA, 37 bp, Homo sapiens; identical to SEQ ID NO: 12157
  source 1..37: mol_type = genomic DNA

SEQ ID NO: 60123 - DNA, 47 bp, Homo sapiens; identical to SEQ ID NO: 8720
  source 1..47: mol_type = genomic DNA

SEQ ID NO: 60124 - DNA, 21 bp, Homo sapiens
  source 1..21: mol_type = genomic DNA
aggtcgatggatcgaaaccat

SEQ ID NO: 60125 - DNA, 25 bp, Homo sapiens
  source 1..25: mol_type = genomic DNA
attcggcgctctcaccgccgcggcc

SEQ ID NO: 60126 - DNA, 27 bp, Homo sapiens
  source 1..27: mol_type = genomic DNA
gagatgaaaacctttttccaaggacac

SEQ ID NO: 60127 - DNA, 40 bp, Homo sapiens; identical to SEQ ID NO: 19702
  source 1..40: mol_type = genomic DNA

SEQ ID NO: 60128 - DNA, 33 bp, Homo sapiens; identical to SEQ ID NO: 10094
  source 1..33: mol_type = genomic DNA

SEQ ID NO: 60129 - DNA, 23 bp, Homo sapiens
  source 1..23: mol_type = genomic DNA
cataatctgaaggtcctgagttc

SEQ ID NO: 60130 - DNA, 18 bp, Homo sapiens
  source 1..18: mol_type = genomic DNA
cgaatctcggtgggacct

SEQ ID NO: 60131 - DNA, 32 bp, Homo sapiens
  source 1..32: mol_type = genomic DNA
gcgatccgagttcaaatctcggtgggacctcc

SEQ ID NO: 60132 - DNA, 33 bp, Homo sapiens; identical to SEQ ID NO: 28279
  source 1..33: mol_type = genomic DNA

SEQ ID NO: 60133 - DNA, 20 bp, Homo sapiens
  source 1..20: mol_type = genomic DNA
cgagtcccttcgtggtcgcc

SEQ ID NO: 60134 - DNA, 44 bp, Homo sapiens; identical to SEQ ID NO: 41748
  source 1..44: mol_type = genomic DNA

SEQ ID NO: 60135 - DNA, 39 bp, Homo sapiens; identical to SEQ ID NO: 28285
  source 1..39: mol_type = genomic DNA

SEQ ID NO: 60136 - DNA, 16 bp, Homo sapiens
  source 1..16: mol_type = genomic DNA
tagagcatttgactgc

SEQ ID NO: 60137 - DNA, 18 bp, Homo sapiens
  source 1..18: mol_type = genomic DNA
agtggcgcagcggaagcg

SEQ ID NO: 60138 - DNA, 35 bp, Homo sapiens; identical to SEQ ID NO: 16416
  source 1..35: mol_type = genomic DNA

SEQ ID NO: 60139 - DNA, 23 bp, Homo sapiens
  source 1..23: mol_type = genomic DNA
gtatgattctcggtttgggtccg

SEQ ID NO: 60140 - DNA, 36 bp, Homo sapiens; identical to SEQ ID NO: 6716
  source 1..36: mol_type = genomic DNA

SEQ ID NO: 60141 - DNA, 17 bp, Homo sapiens
  source 1..17: mol_type = genomic DNA
cgaaaccgggcggaaac

SEQ ID NO: 60142 - DNA, 35 bp, Homo sapiens; identical to SEQ ID NO: 24722
  source 1..35: mol_type = genomic DNA

SEQ ID NO: 60143 - DNA, 18 bp, Homo sapiens
  source 1..18: mol_type = genomic DNA
aggtcgtgagttcgagcc

SEQ ID NO: 60144 - DNA, 37 bp, Homo sapiens; identical to SEQ ID NO: 6717
  source 1..37: mol_type = genomic DNA

SEQ ID NO: 60145 - DNA, 36 bp, Homo sapiens; identical to SEQ ID NO: 10916
  source 1..36: mol_type = genomic DNA

SEQ ID NO: 60146 - DNA, 27 bp, Homo sapiens
  source 1..27: mol_type = genomic DNA
aggcggcccgggttcgactcccggtgt

SEQ ID NO: 60147 - DNA, 37 bp, Homo sapiens; identical to SEQ ID NO: 6703
  source 1..37: mol_type = genomic DNA

SEQ ID NO: 60148 - DNA, 17 bp, Homo sapiens
  source 1..17: mol_type = genomic DNA
attcggcgctctcaccg

SEQ ID NO: 60149 - DNA, 17 bp, Homo sapiens
  source 1..17: mol_type = genomic DNA
attctcggtttgggtcc

SEQ ID NO: 60150 - DNA, 17 bp, Homo sapiens
  source 1..17: mol_type = genomic DNA
tcgactcctggctggct

SEQ ID NO: 60151 - DNA, 35 bp, Homo sapiens; identical to SEQ ID NO: 24531
  source 1..35: mol_type = genomic DNA

SEQ ID NO: 60152 - DNA, 31 bp, Homo sapiens; identical to SEQ ID NO: 3852
  source 1..31: mol_type = genomic DNA

SEQ ID NO: 60153 - DNA, 36 bp, Homo sapiens; identical to SEQ ID NO: 6702
  source 1..36: mol_type = genomic DNA

SEQ ID NO: 60154 - DNA, 36 bp, Homo sapiens; identical to SEQ ID NO: 6723
  source 1..36: mol_type = genomic DNA

SEQ ID NO: 60155 - DNA, 44 bp, Homo sapiens; identical to SEQ ID NO: 36502
  source 1..44: mol_type = genomic DNA

SEQ ID NO: 60156 - DNA, 27 bp, Homo sapiens
  source 1..27: mol_type = genomic DNA
tccgggttcgagtcccggcggagtcgc

SEQ ID NO: 60157 - DNA, 32 bp, Homo sapiens; identical to SEQ ID NO: 19351
  source 1..32: mol_type = genomic DNA

SEQ ID NO: 60158 - DNA, 34 bp, Homo sapiens; identical to SEQ ID NO: 35413
  source 1..34: mol_type = genomic DNA

SEQ ID NO: 60159 - DNA, 43 bp, Homo sapiens; identical to SEQ ID NO: 36499
  source 1..43: mol_type = genomic DNA

SEQ ID NO: 60160 - DNA, 19 bp, Homo sapiens
  source 1..19: mol_type = genomic DNA
cgattcccggccaacgcac

SEQ ID NO: 60161 - DNA, 31 bp, Homo sapiens; identical to SEQ ID NO: 13229
  source 1..31: mol_type = genomic DNA

SEQ ID NO: 60162 - DNA, 34 bp, Homo sapiens; identical to SEQ ID NO: 8933
  source 1..34: mol_type = genomic DNA

SEQ ID NO: 60163 - DNA, 35 bp, Homo sapiens; identical to SEQ ID NO: 24537
  source 1..35: mol_type = genomic DNA

SEQ ID NO: 60164 - DNA, 34 bp, Homo sapiens; identical to SEQ ID NO: 40728
  source 1..34: mol_type = genomic DNA

SEQ ID NO: 60165 - DNA, 35 bp, Homo sapiens; identical to SEQ ID NO: 7816
  source 1..35: mol_type = genomic DNA

SEQ ID NO: 60166 - DNA, 18 bp, Homo sapiens
  source 1..18: mol_type = genomic DNA
gatcccgggcggaaacac

SEQ ID NO: 60167 - DNA, 20 bp, Homo sapiens
  source 1..20: mol_type = genomic DNA
cgatccccgtacgggccacc

SEQ ID NO: 60168 - DNA, 20 bp, Homo sapiens
  source 1..20: mol_type = genomic DNA
tcgatccccgtacgggccac

SEQ ID NO: 60169 - DNA, 25 bp, Homo sapiens
  source 1..25: mol_type = genomic DNA
acgggttcgaaccccgtccgtgcct

SEQ ID NO: 60170 - DNA, 33 bp, Homo sapiens; identical to SEQ ID NO: 10190
  source 1..33: mol_type = genomic DNA

SEQ ID NO: 60171 - DNA, 34 bp, Homo sapiens; identical to SEQ ID NO: 8551
  source 1..34: mol_type = genomic DNA

SEQ ID NO: 60172 - DNA, 44 bp, Homo sapiens; identical to SEQ ID NO: 13630
  source 1..44: mol_type = genomic DNA

SEQ ID NO: 60173 - DNA, 21 bp, Homo sapiens
  source 1..21: mol_type = genomic DNA
gcgttcgattcccggtcaggg

SEQ ID NO: 60174 - DNA, 35 bp, Homo sapiens; identical to SEQ ID NO: 26797
  source 1..35: mol_type = genomic DNA

SEQ ID NO: 60175 - DNA, 32 bp, Homo sapiens; identical to SEQ ID NO: 5167
  source 1..32: mol_type = genomic DNA

SEQ ID NO: 60176 - DNA, 36 bp, Homo sapiens; identical to SEQ ID NO: 20597
  source 1..36: mol_type = genomic DNA

SEQ ID NO: 60177 - DNA, 45 bp, Homo sapiens; identical to SEQ ID NO: 42950
  source 1..45: mol_type = genomic DNA

SEQ ID NO: 60178 - DNA, 44 bp, Homo sapiens; identical to SEQ ID NO: 36500
  source 1..44: mol_type = genomic DNA

SEQ ID NO: 60179 - DNA, 35 bp, Homo sapiens; identical to SEQ ID NO: 20587
  source 1..35: mol_type = genomic DNA

SEQ ID NO: 60180 - DNA, 33 bp, Homo sapiens; identical to SEQ ID NO: 24136
  source 1..33: mol_type = genomic DNA

SEQ ID NO: 60181 - DNA, 33 bp, Homo sapiens; identical to SEQ ID NO: 24938
  source 1..33: mol_type = genomic DNA

SEQ ID NO: 60182 - DNA, 44 bp, Homo sapiens; identical to SEQ ID NO: 10204
  source 1..44: mol_type = genomic DNA

SEQ ID NO: 60183 - DNA, 28 bp, Homo sapiens
  source 1..28: mol_type = genomic DNA
gatccgagttcaaatctcggtgggacct

SEQ ID NO: 60184 - DNA, 44 bp, Homo sapiens; identical to SEQ ID NO: 22583
  source 1..44: mol_type = genomic DNA

SEQ ID NO: 60185 - DNA, 33 bp, Homo sapiens; identical to SEQ ID NO: 24951
  source 1..33: mol_type = genomic DNA

SEQ ID NO: 60186 - DNA, 38 bp, Homo sapiens; identical to SEQ ID NO: 27496
  source 1..38: mol_type = genomic DNA

SEQ ID NO: 60187 - DNA, 37 bp, Homo sapiens; identical to SEQ ID NO: 30923
  source 1..37: mol_type = genomic DNA

SEQ ID NO: 60188 - DNA, 33 bp, Homo sapiens; identical to SEQ ID NO: 5217
  source 1..33: mol_type = genomic DNA

SEQ ID NO: 60189 - DNA, 29 bp, Homo sapiens
  source 1..29: mol_type = genomic DNA
cccaggcggcccgggttcgactcccggtg

SEQ ID NO: 60190 - DNA, 35 bp, Homo sapiens; identical to SEQ ID NO: 14222
  source 1..35: mol_type = genomic DNA

SEQ ID NO: 60191 - DNA, 33 bp, Homo sapiens; identical to SEQ ID NO: 37605
  source 1..33: mol_type = genomic DNA

SEQ ID NO: 60192 - DNA, 34 bp, Homo sapiens; identical to SEQ ID NO: 40650
  source 1..34: mol_type = genomic DNA

SEQ ID NO: 60193 - DNA, 36 bp, Homo sapiens; identical to SEQ ID NO: 918
  source 1..36: mol_type = genomic DNA

SEQ ID NO: 60194 - DNA, 45 bp, Homo sapiens; identical to SEQ ID NO: 3509
  source 1..45: mol_type = genomic DNA

SEQ ID NO: 60195 - DNA, 38 bp, Homo sapiens; identical to SEQ ID NO: 12444
  source 1..38: mol_type = genomic DNA

SEQ ID NO: 60196 - DNA, 25 bp, Homo sapiens
  source 1..25: mol_type = genomic DNA
gtgttcaagtcacgtcggggtcacc

SEQ ID NO: 60197 - DNA, 33 bp, Homo sapiens; identical to SEQ ID NO: 24144
  source 1..33: mol_type = genomic DNA

SEQ ID NO: 60198 - DNA, 36 bp, Homo sapiens; identical to SEQ ID NO: 24723
  source 1..36: mol_type = genomic DNA

SEQ ID NO: 60199 - DNA, 16 bp, Homo sapiens
  source 1..16: mol_type = genomic DNA
tcccggccactgcacc

SEQ ID NO: 60200 - DNA, 20 bp, Homo sapiens
  source 1..20: mol_type = genomic DNA
tcgaatcctgttcgtgacgc

SEQ ID NO: 60201 - DNA, 34 bp, Homo sapiens; identical to SEQ ID NO: 29342
  source 1..34: mol_type = genomic DNA

SEQ ID NO: 60202 - DNA, 33 bp, Homo sapiens; identical to SEQ ID NO: 1664
  source 1..33: mol_type = genomic DNA

SEQ ID NO: 60203 - DNA, 35 bp, Homo sapiens; identical to SEQ ID NO: 33804
  source 1..35: mol_type = genomic DNA

SEQ ID NO: 60204 - DNA, 35 bp, Homo sapiens; identical to SEQ ID NO: 8582
  source 1..35: mol_type = genomic DNA

SEQ ID NO: 60205 - DNA, 34 bp, Homo sapiens; identical to SEQ ID NO: 35054
  source 1..34: mol_type = genomic DNA

SEQ ID NO: 60206 - DNA, 34 bp, Homo sapiens; identical to SEQ ID NO: 11965
  source 1..34: mol_type = genomic DNA

SEQ ID NO: 60207 - DNA, 40 bp, Homo sapiens; identical to SEQ ID NO: 36335
  source 1..40: mol_type = genomic DNA

SEQ ID NO: 60208 - DNA, 36 bp, Homo sapiens; identical to SEQ ID NO: 24532
  source 1..36: mol_type = genomic DNA

SEQ ID NO: 60209 - DNA, 36 bp, Homo sapiens; identical to SEQ ID NO: 24647
  source 1..36: mol_type = genomic DNA

SEQ ID NO: 60210 - DNA, 36 bp, Homo sapiens; identical to SEQ ID NO: 24720
  source 1..36: mol_type = genomic DNA

SEQ ID NO: 60211 - DNA, 35 bp, Homo sapiens; identical to SEQ ID NO: 26765
  source 1..35: mol_type = genomic DNA

SEQ ID NO: 60212 - DNA, 35 bp, Homo sapiens; identical to SEQ ID NO: 29703
  source 1..35: mol_type = genomic DNA

SEQ ID NO: 60213 - DNA, 18 bp, Homo sapiens
  source 1..18: mol_type = genomic DNA
aaaccgggcagaagcacc

SEQ ID NO: 60214 - DNA, 33 bp, Homo sapiens; identical to SEQ ID NO: 3746
  source 1..33: mol_type = genomic DNA

SEQ ID NO: 60215 - DNA, 32 bp, Homo sapiens; identical to SEQ ID NO: 5171
  source 1..32: mol_type = genomic DNA

SEQ ID NO: 60216 - DNA, 18 bp, Homo sapiens
  source 1..18: mol_type = genomic DNA
atccccgtacgggccacc

SEQ ID NO: 60217 - DNA, 29 bp, Homo sapiens
  source 1..29: mol_type = genomic DNA
atcctgggttcgaatcccagcggtgcctc

SEQ ID NO: 60218 - DNA, 35 bp, Homo sapiens; identical to SEQ ID NO: 8007
  source 1..35: mol_type = genomic DNA

SEQ ID NO: 60219 - DNA, 37 bp, Homo sapiens; identical to SEQ ID NO: 8107
  source 1..37: mol_type = genomic DNA

SEQ ID NO: 60220 - DNA, 34 bp, Homo sapiens; identical to SEQ ID NO: 8544
  source 1..34: mol_type = genomic DNA

SEQ ID NO: 60221 - DNA, 34 bp, Homo sapiens; identical to SEQ ID NO: 8555
  source 1..34: mol_type = genomic DNA

SEQ ID NO: 60222 - DNA, 34 bp, Homo sapiens; identical to SEQ ID NO: 8833
  source 1..34: mol_type = genomic DNA

SEQ ID NO: 60223 - DNA, 30 bp, Homo sapiens; identical to SEQ ID NO: 34870
  source 1..30: mol_type = genomic DNA

SEQ ID NO: 60224 - DNA, 35 bp, Homo sapiens; identical to SEQ ID NO: 11540
  source 1..35: mol_type = genomic DNA

SEQ ID NO: 60225 - DNA, 18 bp, Homo sapiens
  source 1..18: mol_type = genomic DNA
cgaaaccgggcggaaaca

SEQ ID NO: 60226 - DNA, 20 bp, Homo sapiens
  source 1..20: mol_type = genomic DNA
ctaaaccatcctctgctacc

SEQ ID NO: 60227 - DNA, 41 bp, Homo sapiens; identical to SEQ ID NO: 36336
  source 1..41: mol_type = genomic DNA

SEQ ID NO: 60228 - DNA, 34 bp, Homo sapiens; identical to SEQ ID NO: 14221
  source 1..34: mol_type = genomic DNA

SEQ ID NO: 60229 - DNA, 34 bp, Homo sapiens; identical to SEQ ID NO: 14594
  source 1..34: mol_type = genomic DNA

SEQ ID NO: 60230 - DNA, 37 bp, Homo sapiens; identical to SEQ ID NO: 14763
  source 1..37: mol_type = genomic DNA

SEQ ID NO: 60231 - DNA, 18 bp, Homo sapiens
  source 1..18: mol_type = genomic DNA
gaaaccgggcagaagcac

SEQ ID NO: 60232 - DNA, 19 bp, Homo sapiens
  source 1..19: mol_type = genomic DNA
gaaaccgggcagaagcacc

SEQ ID NO: 60233 - DNA, 17 bp, Homo sapiens
  source 1..17: mol_type = genomic DNA
gaaaccgggcggaaaca

SEQ ID NO: 60234 - DNA, 36 bp, Homo sapiens; identical to SEQ ID NO: 16007
  source 1..36: mol_type = genomic DNA

SEQ ID NO: 60235 - DNA, 32 bp, Homo sapiens; identical to SEQ ID NO: 17062
  source 1..32: mol_type = genomic DNA

SEQ ID NO: 60236 - DNA, 30 bp, Homo sapiens; identical to SEQ ID NO: 18559
  source 1..30: mol_type = genomic DNA

SEQ ID NO: 60237 - DNA, 24 bp, Homo sapiens
  source 1..24: mol_type = genomic DNA
ggttcaaatcccggacgagccccc

SEQ ID NO: 60238 - DNA, 35 bp, Homo sapiens; identical to SEQ ID NO: 24646
  source 1..35: mol_type = genomic DNA

SEQ ID NO: 60239 - DNA, 40 bp, Homo sapiens; identical to SEQ ID NO: 41654
  source 1..40: mol_type = genomic DNA

SEQ ID NO: 60240 - DNA, 36 bp, Homo sapiens; identical to SEQ ID NO: 26864
  source 1..36: mol_type = genomic DNA

SEQ ID NO: 60241 - DNA, 35 bp, Homo sapiens; identical to SEQ ID NO: 30250
  source 1..35: mol_type = genomic DNA

SEQ ID NO: 60242 - DNA, 36 bp, Homo sapiens; identical to SEQ ID NO: 8927
  source 1..36: mol_type = genomic DNA

SEQ ID NO: 60243 - DNA, 31 bp, Homo sapiens; identical to SEQ ID NO: 747
  source 1..31: mol_type = genomic DNA

SEQ ID NO: 60244 - DNA, 26 bp, Homo sapiens
  source 1..26: mol_type = genomic DNA
gtagtggttatcacgttcgcctcaca

SEQ ID NO: 60245 - DNA, 29 bp, Homo sapiens
  source 1..29: mol_type = genomic DNA
gtcggtagagcatgggactcttaatccca

SEQ ID NO: 60246 - DNA, 48 bp, Homo sapiens; identical to SEQ ID NO: 15503
  source 1..48: mol_type = genomic DNA

SEQ ID NO: 60247 - DNA, 17 bp, Homo sapiens
  source 1..17: mol_type = genomic DNA
agttctggtctccggat

SEQ ID NO: 60248 - DNA, 18 bp, Homo sapiens
  source 1..18: mol_type = genomic DNA
aaccgggcagaaacacca

SEQ ID NO: 60249 - DNA, 35 bp, Homo sapiens; identical to SEQ ID NO: 10673
  source 1..35: mol_type = genomic DNA

SEQ ID NO: 60250 - DNA, 30 bp, Homo sapiens; identical to SEQ ID NO: 2590
  source 1..30: mol_type = genomic DNA

SEQ ID NO: 60251 - DNA, 37 bp, Homo sapiens; identical to SEQ ID NO: 2889
  source 1..37: mol_type = genomic DNA

SEQ ID NO: 60252 - DNA, 40 bp, Homo sapiens; identical to SEQ ID NO: 10736
  source 1..40: mol_type = genomic DNA

SEQ ID NO: 60253 - DNA, 36 bp, Homo sapiens; identical to SEQ ID NO: 24964
  source 1..36: mol_type = genomic DNA

SEQ ID NO: 60254 - DNA, 33 bp, Homo sapiens; identical to SEQ ID NO: 16879
  source 1..33: mol_type = genomic DNA

SEQ ID NO: 60255 - DNA, 18 bp, Homo sapiens
  source 1..18: mol_type = genomic DNA
aaccgagcggaaacacca

SEQ ID NO: 60256 - DNA, 48 bp, Homo sapiens; identical to SEQ ID NO: 6485
  source 1..48: mol_type = genomic DNA

SEQ ID NO: 60257 - DNA, 17 bp, Homo sapiens
  source 1..17: mol_type = genomic DNA
aaccgggcagaaacacc

SEQ ID NO: 60258 - DNA, 18 bp, Homo sapiens
  source 1..18: mol_type = genomic DNA
ggggttcgattccttcct

SEQ ID NO: 60259 - DNA, 42 bp, Homo sapiens; identical to SEQ ID NO: 9544
  source 1..42: mol_type = genomic DNA

SEQ ID NO: 60260 - DNA, 36 bp, Homo sapiens; identical to SEQ ID NO: 7250
  source 1..36: mol_type = genomic DNA

SEQ ID NO: 60261 - DNA, 29 bp, Homo sapiens
  source 1..29: mol_type = genomic DNA
gtcggtagagcatgagactcttaatctca

SEQ ID NO: 60262 - DNA, 48 bp, Homo sapiens; identical to SEQ ID NO: 1967
  source 1..48: mol_type = genomic DNA

SEQ ID NO: 60263 - DNA, 31 bp, Homo sapiens; identical to SEQ ID NO: 17920
  source 1..31: mol_type = genomic DNA

SEQ ID NO: 60264 - DNA, 31 bp, Homo sapiens; identical to SEQ ID NO: 16238
  source 1..31: mol_type = genomic DNA

SEQ ID NO: 60265 - DNA, 31 bp, Homo sapiens; identical to SEQ ID NO: 10570
  source 1..31: mol_type = genomic DNA

SEQ ID NO: 60266 - DNA, 37 bp, Homo sapiens; identical to SEQ ID NO: 13206
  source 1..37: mol_type = genomic DNA

SEQ ID NO: 60267 - DNA, 17 bp, Homo sapiens
  source 1..17: mol_type = genomic DNA
aaccgagcggaaacacc

SEQ ID NO: 60268 - DNA, 33 bp, Homo sapiens; identical to SEQ ID NO: 15078
  source 1..33: mol_type = genomic DNA

SEQ ID NO: 60269 - DNA, 18 bp, Homo sapiens
  source 1..18: mol_type = genomic DNA
tggttatcacgtctgctt

SEQ ID NO: 60270 - DNA, 34 bp, Homo sapiens; identical to SEQ ID NO: 15079
  source 1..34: mol_type = genomic DNA

SEQ ID NO: 60271 - DNA, 34 bp, Homo sapiens; identical to SEQ ID NO: 29264
  source 1..34: mol_type = genomic DNA

SEQ ID NO: 60272 - DNA, 31 bp, Homo sapiens; identical to SEQ ID NO: 15076
  source 1..31: mol_type = genomic DNA

SEQ ID NO: 60273 - DNA, 37 bp, Homo sapiens; identical to SEQ ID NO: 2311
  source 1..37: mol_type = genomic DNA

SEQ ID NO: 60274 - DNA, 34 bp, Homo sapiens; identical to SEQ ID NO: 4435
  source 1..34: mol_type = genomic DNA

SEQ ID NO: 60275 - DNA, 34 bp, Homo sapiens; identical to SEQ ID NO: 10908
  source 1..34: mol_type = genomic DNA

SEQ ID NO: 60276 - DNA, 32 bp, Homo sapiens; identical to SEQ ID NO: 14910
  source 1..32: mol_type = genomic DNA

SEQ ID NO: 60277 - DNA, 29 bp, Homo sapiens
  source 1..29: mol_type = genomic DNA
ttggtctaggggtatgattctcgctttgg

SEQ ID NO: 60278 - DNA, 28 bp, Homo sapiens
  source 1..28: mol_type = genomic DNA
ggtccagggttcaagtccctgttcgggc

SEQ ID NO: 60279 - DNA, 33 bp, Homo sapiens; identical to SEQ ID NO: 23457
  source 1..33: mol_type = genomic DNA

SEQ ID NO: 60280 - DNA, 34 bp, Homo sapiens; identical to SEQ ID NO: 10672
  source 1..34: mol_type = genomic DNA

SEQ ID NO: 60281 - DNA, 32 bp, Homo sapiens; identical to SEQ ID NO: 3921
  source 1..32: mol_type = genomic DNA

SEQ ID NO: 60282 - DNA, 34 bp, Homo sapiens; identical to SEQ ID NO: 8039
  source 1..34: mol_type = genomic DNA

SEQ ID NO: 60283 - DNA, 34 bp, Homo sapiens; identical to SEQ ID NO: 15089
  source 1..34: mol_type = genomic DNA

SEQ ID NO: 60284 - DNA, 32 bp, Homo sapiens; identical to SEQ ID NO: 26542
  source 1..32: mol_type = genomic DNA

SEQ ID NO: 60285 - DNA, 35 bp, Homo sapiens; identical to SEQ ID NO: 10988
  source 1..35: mol_type = genomic DNA

SEQ ID NO: 60286 - DNA, 26 bp, Homo sapiens
  source 1..26: mol_type = genomic DNA
gctcagtcggtagagcatgagactct

SEQ ID NO: 60287 - DNA, 40 bp, Homo sapiens; identical to SEQ ID NO: 22230
  source 1..40: mol_type = genomic DNA

SEQ ID NO: 60288 - DNA, 31 bp, Homo sapiens; identical to SEQ ID NO: 4233
  source 1..31: mol_type = genomic DNA

SEQ ID NO: 60289 - DNA, 17 bp, Homo sapiens
  source 1..17: mol_type = genomic DNA
gcagcgatggccgagtg

SEQ ID NO: 60290 - DNA, 25 bp, Homo sapiens
  source 1..25: mol_type = genomic DNA
tagtaccgttaacttccaattaact

SEQ ID NO: 60291 - DNA, 34 bp, Homo sapiens; identical to SEQ ID NO: 29843
  source 1..34: mol_type = genomic DNA

SEQ ID NO: 60292 - DNA, 33 bp, Homo sapiens; identical to SEQ ID NO: 1052
  source 1..33: mol_type = genomic DNA

SEQ ID NO: 60293 - DNA, 28 bp, Homo sapiens
  source 1..28: mol_type = genomic DNA
agaaagctcacaagaactgctaactcat

SEQ ID NO: 60294 - DNA, 30 bp, Homo sapiens; identical to SEQ ID NO: 7630
  source 1..30: mol_type = genomic DNA

SEQ ID NO: 60295 - DNA, 22 bp, Homo sapiens
  source 1..22: mol_type = genomic DNA
gacttaagatccaatggacata

SEQ ID NO: 60296 - DNA, 34 bp, Homo sapiens; identical to SEQ ID NO: 16880
  source 1..34: mol_type = genomic DNA

SEQ ID NO: 60297 - DNA, 38 bp, Homo sapiens; identical to SEQ ID NO: 23348
  source 1..38: mol_type = genomic DNA

SEQ ID NO: 60298 - DNA, 46 bp, Homo sapiens; identical to SEQ ID NO: 7746
  source 1..46: mol_type = genomic DNA

SEQ ID NO: 60299 - DNA, 34 bp, Homo sapiens; identical to SEQ ID NO: 21187
  source 1..34: mol_type = genomic DNA

SEQ ID NO: 60300 - DNA, 34 bp, Homo sapiens; identical to SEQ ID NO: 4780
  source 1..34: mol_type = genomic DNA

SEQ ID NO: 60301 - DNA, 44 bp, Homo sapiens; identical to SEQ ID NO: 22552
  source 1..44: mol_type = genomic DNA

SEQ ID NO: 60302 - DNA, 33 bp, Homo sapiens; identical to SEQ ID NO: 2707
  source 1..33: mol_type = genomic DNA

SEQ ID NO: 60303 - DNA, 40 bp, Homo sapiens; identical to SEQ ID NO: 21196
  source 1..40: mol_type = genomic DNA

SEQ ID NO: 60304 - DNA, 33 bp, Homo sapiens; identical to SEQ ID NO: 26525
  source 1..33: mol_type = genomic DNA

SEQ ID NO: 60305 - DNA, 36 bp, Homo sapiens; identical to SEQ ID NO: 16666
  source 1..36: mol_type = genomic DNA

SEQ ID NO: 60306 - DNA, 37 bp, Homo sapiens; identical to SEQ ID NO: 6717
  source 1..37: mol_type = genomic DNA

SEQ ID NO: 60307 - DNA, 38 bp, Homo sapiens; identical to SEQ ID NO: 8791
  source 1..38: mol_type = genomic DNA

SEQ ID NO: 60308 - DNA, 44 bp, Homo sapiens; identical to SEQ ID NO: 21494
  source 1..44: mol_type = genomic DNA

SEQ ID NO: 60309 - DNA, 20 bp, Homo sapiens
  source 1..20: mol_type = genomic DNA
gagcatgggactcttaatcc

SEQ ID NO: 60310 - DNA, 27 bp, Homo sapiens
  source 1..27: mol_type = genomic DNA
agtaagttgcaatacttaatttctgcc

SEQ ID NO: 60311 - DNA, 27 bp, Homo sapiens
  source 1..27: mol_type = genomic DNA
gaaagctcacaagaactgctaactcat

SEQ ID NO: 60312 - DNA, 46 bp, Homo sapiens; identical to SEQ ID NO: 19946
  source 1..46: mol_type = genomic DNA

SEQ ID NO: 60313 - DNA, 30 bp, Homo sapiens; identical to SEQ ID NO: 4474
  source 1..30: mol_type = genomic DNA

SEQ ID NO: 60314 - DNA, 33 bp, Homo sapiens; identical to SEQ ID NO: 11073
  source 1..33: mol_type = genomic DNA

SEQ ID NO: 60315 - DNA, 33 bp, Homo sapiens; identical to SEQ ID NO: 21141
  source 1..33: mol_type = genomic DNA

SEQ ID NO: 60316 - DNA, 22 bp, Homo sapiens
  source 1..22: mol_type = genomic DNA
gtggttatcacatctgctttac

SEQ ID NO: 60317 - DNA, 30 bp, Homo sapiens; identical to SEQ ID NO: 10503
  source 1..30: mol_type = genomic DNA

SEQ ID NO: 60318 - DNA, 48 bp, Homo sapiens; identical to SEQ ID NO: 8259
  source 1..48: mol_type = genomic DNA

SEQ ID NO: 60319 - DNA, 37 bp, Homo sapiens; identical to SEQ ID NO: 22497
  source 1..37: mol_type = genomic DNA

SEQ ID NO: 60320 - DNA, 18 bp, Homo sapiens
  source 1..18: mol_type = genomic DNA
aactgggcggaaacacca

SEQ ID NO: 60321 - DNA, 31 bp, Homo sapiens; identical to SEQ ID NO: 2705
  source 1..31: mol_type = genomic DNA

SEQ ID NO: 60322 - DNA, 32 bp, Homo sapiens; identical to SEQ ID NO: 8806
  source 1..32: mol_type = genomic DNA

SEQ ID NO: 60323 - DNA, 16 bp, Homo sapiens
  source 1..16: mol_type = genomic DNA
cgcccggctagctcag

SEQ ID NO: 60324 - DNA, 46 bp, Homo sapiens; identical to SEQ ID NO: 58
  source 1..46: mol_type = genomic DNA

SEQ ID NO: 60325 - DNA, 45 bp, Homo sapiens; identical to SEQ ID NO: 20165
  source 1..45: mol_type = genomic DNA

SEQ ID NO: 60326 - DNA, 43 bp, Homo sapiens; identical to SEQ ID NO: 7621
  source 1..43: mol_type = genomic DNA

SEQ ID NO: 60327 - DNA, 33 bp, Homo sapiens; identical to SEQ ID NO: 10211
  source 1..33: mol_type = genomic DNA

SEQ ID NO: 60328 - DNA, 32 bp, Homo sapiens; identical to SEQ ID NO: 10829
  source 1..32: mol_type = genomic DNA

SEQ ID NO: 60329 - DNA, 21 bp, Homo sapiens
  source 1..21: mol_type = genomic DNA
cttaagatccaatggacatat

SEQ ID NO: 60330 - DNA, 27 bp, Homo sapiens
  source 1..27: mol_type = genomic DNA
tagctcagtcggtagagcatgagactc

SEQ ID NO: 60331 - DNA, 31 bp, Homo sapiens; identical to SEQ ID NO: 7037
  source 1..31: mol_type = genomic DNA

SEQ ID NO: 60332 - DNA, 35 bp, Homo sapiens; identical to SEQ ID NO: 7424
  source 1..35: mol_type = genomic DNA

SEQ ID NO: 60333 - DNA, 31 bp, Homo sapiens; identical to SEQ ID NO: 17725
  source 1..31: mol_type = genomic DNA

SEQ ID NO: 60334 - DNA, 25 bp, Homo sapiens
  source 1..25: mol_type = genomic DNA
agcagcttcaaacctgccggggctt

SEQ ID NO: 60335 - DNA, 16 bp, Homo sapiens
  source 1..16: mol_type = genomic DNA
ttaggagatttcaact

SEQ ID NO: 60336 - DNA, 28 bp, Homo sapiens
  source 1..28: mol_type = genomic DNA
ttttgacaacattcaaaaaagagtacca

SEQ ID NO: 60337 - DNA, 31 bp, Homo sapiens; identical to SEQ ID NO: 15332
  source 1..31: mol_type = genomic DNA

SEQ ID NO: 60338 - DNA, 32 bp, Homo sapiens; identical to SEQ ID NO: 21140
  source 1..32: mol_type = genomic DNA

SEQ ID NO: 60339 - DNA, 48 bp, Homo sapiens; identical to SEQ ID NO: 24785
  source 1..48: mol_type = genomic DNA

SEQ ID NO: 60340 - DNA, 32 bp, Homo sapiens; identical to SEQ ID NO: 10267
  source 1..32: mol_type = genomic DNA

SEQ ID NO: 60341 - DNA, 31 bp, Homo sapiens; identical to SEQ ID NO: 10815
  source 1..31: mol_type = genomic DNA

SEQ ID NO: 60342 - DNA, 32 bp, Homo sapiens; identical to SEQ ID NO: 13255
  source 1..32: mol_type = genomic DNA

SEQ ID NO: 60343 - DNA, 30 bp, Homo sapiens; identical to SEQ ID NO: 3839
  source 1..30: mol_type = genomic DNA

SEQ ID NO: 60344 - DNA, 31 bp, Homo sapiens; identical to SEQ ID NO: 13047
  source 1..31: mol_type = genomic DNA

SEQ ID NO: 60345 - DNA, 26 bp, Homo sapiens
  source 1..26: mol_type = genomic DNA
agcagcttcaaacctgccggggcttc

SEQ ID NO: 60346 - DNA, 17 bp, Homo sapiens
  source 1..17: mol_type = genomic DNA
ttcccggccagggaacc

SEQ ID NO: 60347 - DNA, 37 bp, Homo sapiens; identical to SEQ ID NO: 26409
  source 1..37: mol_type = genomic DNA

SEQ ID NO: 60348 - DNA, 31 bp, Homo sapiens; identical to SEQ ID NO: 10276
  source 1..31: mol_type = genomic DNA

SEQ ID NO: 60349 - DNA, 48 bp, Homo sapiens; identical to SEQ ID NO: 1961
  source 1..48: mol_type = genomic DNA

SEQ ID NO: 60350 - DNA, 34 bp, Homo sapiens; identical to SEQ ID NO: 8925
  source 1..34: mol_type = genomic DNA

SEQ ID NO: 60351 - DNA, 45 bp, Homo sapiens; identical to SEQ ID NO: 14160
  source 1..45: mol_type = genomic DNA

SEQ ID NO: 60352 - DNA, 33 bp, Homo sapiens; identical to SEQ ID NO: 15287
  source 1..33: mol_type = genomic DNA

SEQ ID NO: 60353 - DNA, 30 bp, Homo sapiens; identical to SEQ ID NO: 15773
  source 1..30: mol_type = genomic DNA

SEQ ID NO: 60354 - DNA, 35 bp, Homo sapiens; identical to SEQ ID NO: 8926
  source 1..35: mol_type = genomic DNA

SEQ ID NO: 60355 - DNA, 17 bp, Homo sapiens
  source 1..17: mol_type = genomic DNA
ctggttcgattccggct

SEQ ID NO: 60356 - DNA, 41 bp, Homo sapiens; identical to SEQ ID NO: 31016
  source 1..41: mol_type = genomic DNA

SEQ ID NO: 60357 - DNA, 40 bp, Homo sapiens; identical to SEQ ID NO: 25685
  source 1..40: mol_type = genomic DNA

SEQ ID NO: 60358 - DNA, 34 bp, Homo sapiens; identical to SEQ ID NO: 771
  source 1..34: mol_type = genomic DNA

SEQ ID NO: 60359 - DNA, 21 bp, Homo sapiens
  source 1..21: mol_type = genomic DNA
agagtaaataataggagctta

SEQ ID NO: 60360 - DNA, 32 bp, Homo sapiens; identical to SEQ ID NO: 10481
  source 1..32: mol_type = genomic DNA

SEQ ID NO: 60361 - DNA, 31 bp, Homo sapiens; identical to SEQ ID NO: 15486
  source 1..31: mol_type = genomic DNA

SEQ ID NO: 60362 - DNA, 39 bp, Homo sapiens; identical to SEQ ID NO: 7909
  source 1..39: mol_type = genomic DNA

SEQ ID NO: 60363 - DNA, 35 bp, Homo sapiens; identical to SEQ ID NO: 13650
  source 1..35: mol_type = genomic DNA

SEQ ID NO: 60364 - DNA, 39 bp, Homo sapiens; identical to SEQ ID NO: 17118
  source 1..39: mol_type = genomic DNA

SEQ ID NO: 60365 - DNA, 25 bp, Homo sapiens
  source 1..25: mol_type = genomic DNA
ttagaatcttagctttgggtgctaa

SEQ ID NO: 60366 - DNA, 46 bp, Homo sapiens; identical to SEQ ID NO: 29176
  source 1..46: mol_type = genomic DNA

SEQ ID NO: 60367 - DNA, 34 bp, Homo sapiens; identical to SEQ ID NO: 6230
  source 1..34: mol_type = genomic DNA

SEQ ID NO: 60368 - DNA, 31 bp, Homo sapiens; identical to SEQ ID NO: 10266
  source 1..31: mol_type = genomic DNA

SEQ ID NO: 60369 - DNA, 42 bp, Homo sapiens; identical to SEQ ID NO: 14975
  source 1..42: mol_type = genomic DNA

SEQ ID NO: 60370 - DNA, 32 bp, Homo sapiens; identical to SEQ ID NO: 1540
  source 1..32: mol_type = genomic DNA

SEQ ID NO: 60371 - DNA, 48 bp, Homo sapiens; identical to SEQ ID NO: 6258
  source 1..48: mol_type = genomic DNA

SEQ ID NO: 60372 - DNA, 18 bp, Homo sapiens
  source 1..18: mol_type = genomic DNA
gtcccggcagagatgcca

SEQ ID NO: 60373 - DNA, 35 bp, Homo sapiens; identical to SEQ ID NO: 29550
  source 1..35: mol_type = genomic DNA

SEQ ID NO: 60374 - DNA, 48 bp, Homo sapiens; identical to SEQ ID NO: 978
  source 1..48: mol_type = genomic DNA

SEQ ID NO: 60375 - DNA, 44 bp, Homo sapiens; identical to SEQ ID NO: 7693
  source 1..44: mol_type = genomic DNA

SEQ ID NO: 60376 - DNA, 41 bp, Homo sapiens; identical to SEQ ID NO: 8794
  source 1..41: mol_type = genomic DNA

SEQ ID NO: 60377 - DNA, 48 bp, Homo sapiens; identical to SEQ ID NO: 8801
  source 1..48: mol_type = genomic DNA

SEQ ID NO: 60378 - DNA, 32 bp, Homo sapiens; identical to SEQ ID NO: 9679
  source 1..32: mol_type = genomic DNA

SEQ ID NO: 60379 - DNA, 44 bp, Homo sapiens; identical to SEQ ID NO: 15269
  source 1..44: mol_type = genomic DNA

SEQ ID NO: 60380 - DNA, 34 bp, Homo sapiens; identical to SEQ ID NO: 273
  source 1..34: mol_type = genomic DNA

SEQ ID NO: 60381 - DNA, 33 bp, Homo sapiens; identical to SEQ ID NO: 10496
  source 1..33: mol_type = genomic DNA

SEQ ID NO: 60382 - DNA, 24 bp, Homo sapiens
  source 1..24: mol_type = genomic DNA
cccattcttgcgacccgggttcga

SEQ ID NO: 60383 - DNA, 32 bp, Homo sapiens; identical to SEQ ID NO: 13378
  source 1..32: mol_type = genomic DNA

SEQ ID NO: 60384 - DNA, 40 bp, Homo sapiens; identical to SEQ ID NO: 19702
  source 1..40: mol_type = genomic DNA

SEQ ID NO: 60385 - DNA, 34 bp, Homo sapiens; identical to SEQ ID NO: 27658
  source 1..34: mol_type = genomic DNA

SEQ ID NO: 60386 - DNA, 48 bp, Homo sapiens; identical to SEQ ID NO: 3720
  source 1..48: mol_type = genomic DNA

SEQ ID NO: 60387 - DNA, 44 bp, Homo sapiens; identical to SEQ ID NO: 8797
  source 1..44: mol_type = genomic DNA

SEQ ID NO: 60388 - DNA, 34 bp, Homo sapiens; identical to SEQ ID NO: 13417
  source 1..34: mol_type = genomic DNA

SEQ ID NO: 60389 - DNA, 48 bp, Homo sapiens; identical to SEQ ID NO: 23915
  source 1..48: mol_type = genomic DNA

SEQ ID NO: 60390 - DNA, 33 bp, Homo sapiens; identical to SEQ ID NO: 28596
  source 1..33: mol_type = genomic DNA

SEQ ID NO: 60391 - DNA, 33 bp, Homo sapiens; identical to SEQ ID NO: 3077
  source 1..33: mol_type = genomic DNA

SEQ ID NO: 60392 - DNA, 25 bp, Homo sapiens
  source 1..25: mol_type = genomic DNA
gagatgaaaacctttttccaaggac

SEQ ID NO: 60393 - DNA, 16 bp, Homo sapiens
  source 1..16: mol_type = genomic DNA
gtcgcagtctcccctg

SEQ ID NO: 60394 - DNA, 30 bp, Homo sapiens; identical to SEQ ID NO: 5865
  source 1..30: mol_type = genomic DNA

SEQ ID NO: 60395 - DNA, 32 bp, Homo sapiens; identical to SEQ ID NO: 6370
  source 1..32: mol_type = genomic DNA

SEQ ID NO: 60396 - DNA, 33 bp, Homo sapiens; identical to SEQ ID NO: 14500
  source 1..33: mol_type = genomic DNA

SEQ ID NO: 60397 - DNA, 30 bp, Homo sapiens; identical to SEQ ID NO: 22648
  source 1..30: mol_type = genomic DNA

SEQ ID NO: 60398 - DNA, 38 bp, Homo sapiens; identical to SEQ ID NO: 23697
  source 1..38: mol_type = genomic DNA

SEQ ID NO: 60399 - DNA, 26 bp, Homo sapiens
  source 1..26: mol_type = genomic DNA
tttgatagagtaaataataggagctt

SEQ ID NO: 60400 - DNA, 45 bp, Homo sapiens; identical to SEQ ID NO: 57
  source 1..45: mol_type = genomic DNA

SEQ ID NO: 60401 - DNA, 36 bp, Homo sapiens; identical to SEQ ID NO: 6656
  source 1..36: mol_type = genomic DNA

SEQ ID NO: 60402 - DNA, 37 bp, Homo sapiens; identical to SEQ ID NO: 17342
  source 1..37: mol_type = genomic DNA

SEQ ID NO: 60403 - DNA, 32 bp, Homo sapiens; identical to SEQ ID NO: 836
  source 1..32: mol_type = genomic DNA

SEQ ID NO: 60404 - DNA, 38 bp, Homo sapiens; identical to SEQ ID NO: 3115
  source 1..38: mol_type = genomic DNA

SEQ ID NO: 60405 - DNA, 34 bp, Homo sapiens; identical to SEQ ID NO: 8787
  source 1..34: mol_type = genomic DNA

SEQ ID NO: 60406 - DNA, 34 bp, Homo sapiens; identical to SEQ ID NO: 9708
  source 1..34: mol_type = genomic DNA

SEQ ID NO: 60407 - DNA, 34 bp, Homo sapiens; identical to SEQ ID NO: 23693
  source 1..34: mol_type = genomic DNA

SEQ ID NO: 60408 - DNA, 43 bp, Homo sapiens; identical to SEQ ID NO: 28347
  source 1..43: mol_type = genomic DNA

SEQ ID NO: 60409 - DNA, 41 bp, Homo sapiens; identical to SEQ ID NO: 4159
  source 1..41: mol_type = genomic DNA

SEQ ID NO: 60410 - DNA, 45 bp, Homo sapiens; identical to SEQ ID NO: 8798
  source 1..45: mol_type = genomic DNA

SEQ ID NO: 60411 - DNA, 45 bp, Homo sapiens; identical to SEQ ID NO: 12307
  source 1..45: mol_type = genomic DNA

SEQ ID NO: 60412 - DNA, 32 bp, Homo sapiens; identical to SEQ ID NO: 15286
  source 1..32: mol_type = genomic DNA

SEQ ID NO: 60413 - DNA, 32 bp, Homo sapiens; identical to SEQ ID NO: 17569
  source 1..32: mol_type = genomic DNA

SEQ ID NO: 60414 - DNA, 21 bp, Homo sapiens
  source 1..21: mol_type = genomic DNA
tcaaagttaaattataggcta

SEQ ID NO: 60415 - DNA, 44 bp, Homo sapiens; identical to SEQ ID NO: 27177
  source 1..44: mol_type = genomic DNA

SEQ ID NO: 60416 - DNA, 34 bp, Homo sapiens; identical to SEQ ID NO: 27197
  source 1..34: mol_type = genomic DNA

SEQ ID NO: 60417 - DNA, 37 bp, Homo sapiens; identical to SEQ ID NO: 2795
  source 1..37: mol_type = genomic DNA

SEQ ID NO: 60418 - DNA, 26 bp, Homo sapiens
  source 1..26: mol_type = genomic DNA
agaaagctcacaagaactgctaactc

SEQ ID NO: 60419 - DNA, 39 bp, Homo sapiens; identical to SEQ ID NO: 5421
  source 1..39: mol_type = genomic DNA

SEQ ID NO: 60420 - DNA, 32 bp, Homo sapiens; identical to SEQ ID NO: 10582
  source 1..32: mol_type = genomic DNA

SEQ ID NO: 60421 - DNA, 44 bp, Homo sapiens; identical to SEQ ID NO: 14846
  source 1..44: mol_type = genomic DNA

SEQ ID NO: 60422 - DNA, 31 bp, Homo sapiens; identical to SEQ ID NO: 22605
  source 1..31: mol_type = genomic DNA

SEQ ID NO: 60423 - DNA, 30 bp, Homo sapiens; identical to SEQ ID NO: 25109
  source 1..30: mol_type = genomic DNA

SEQ ID NO: 60424 - DNA, 46 bp, Homo sapiens; identical to SEQ ID NO: 4928
  source 1..46: mol_type = genomic DNA

SEQ ID NO: 60425 - DNA, 33 bp, Homo sapiens; identical to SEQ ID NO: 13751
  source 1..33: mol_type = genomic DNA

SEQ ID NO: 60426 - DNA, 34 bp, Homo sapiens; identical to SEQ ID NO: 23712
  source 1..34: mol_type = genomic DNA

SEQ ID NO: 60427 - DNA, 35 bp, Homo sapiens; identical to SEQ ID NO: 274
  source 1..35: mol_type = genomic DNA

SEQ ID NO: 60428 - DNA, 25 bp, Homo sapiens
  source 1..25: mol_type = genomic DNA
tagaattctcgcctgccacgcggga

SEQ ID NO: 60429 - DNA, 32 bp, Homo sapiens; identical to SEQ ID NO: 3076
  source 1..32: mol_type = genomic DNA

SEQ ID NO: 60430 - DNA, 42 bp, Homo sapiens; identical to SEQ ID NO: 11550
  source 1..42: mol_type = genomic DNA

SEQ ID NO: 60431 - DNA, 33 bp, Homo sapiens; identical to SEQ ID NO: 24144
  source 1..33: mol_type = genomic DNA

SEQ ID NO: 60432 - DNA, 28 bp, Homo sapiens
  source 1..28: mol_type = genomic DNA
atgggttcgattctcatagtcctagcca

SEQ ID NO: 60433 - DNA, 37 bp, Homo sapiens; identical to SEQ ID NO: 7426
  source 1..37: mol_type = genomic DNA

SEQ ID NO: 60434 - DNA, 43 bp, Homo sapiens; identical to SEQ ID NO: 15425
  source 1..43: mol_type = genomic DNA

SEQ ID NO: 60435 - DNA, 28 bp, Homo sapiens
  source 1..28: mol_type = genomic DNA
gttttgacaacattcaaaaaagagtacc

SEQ ID NO: 60436 - DNA, 48 bp, Homo sapiens; identical to SEQ ID NO: 23932
  source 1..48: mol_type = genomic DNA

SEQ ID NO: 60437 - DNA, 33 bp, Homo sapiens; identical to SEQ ID NO: 29168
  source 1..33: mol_type = genomic DNA

SEQ ID NO: 60438 - DNA, 29 bp, Homo sapiens
  source 1..29: mol_type = genomic DNA
aacagaggcttacgaccccttatttaccc

SEQ ID NO: 60439 - DNA, 31 bp, Homo sapiens; identical to SEQ ID NO: 1853
  source 1..31: mol_type = genomic DNA

SEQ ID NO: 60440 - DNA, 37 bp, Homo sapiens; identical to SEQ ID NO: 2042
  source 1..37: mol_type = genomic DNA

SEQ ID NO: 60441 - DNA, 29 bp, Homo sapiens
  source 1..29: mol_type = genomic DNA
acaggagatcctgggttcgaatcccagcg

SEQ ID NO: 60442 - DNA, 29 bp, Homo sapiens
  source 1..29: mol_type = genomic DNA
agcgatccgagttcaaatctcggtggaac

SEQ ID NO: 60443 - DNA, 24 bp, Homo sapiens
  source 1..24: mol_type = genomic DNA
agcgtgctgggcccataacccaga

SEQ ID NO: 60444 - DNA, 36 bp, Homo sapiens; identical to SEQ ID NO: 6797
  source 1..36: mol_type = genomic DNA

SEQ ID NO: 60445 - DNA, 18 bp, Homo sapiens
  source 1..18: mol_type = genomic DNA
attaactagttttgacaa

SEQ ID NO: 60446 - DNA, 32 bp, Homo sapiens; identical to SEQ ID NO: 8617
  source 1..32: mol_type = genomic DNA

SEQ ID NO: 60447 - DNA, 25 bp, Homo sapiens
  source 1..25: mol_type = genomic DNA
cagattgtgaatctgacaacagagg

SEQ ID NO: 60448 - DNA, 48 bp, Homo sapiens; identical to SEQ ID NO: 9513
  source 1..48: mol_type = genomic DNA

SEQ ID NO: 60449 - DNA, 46 bp, Homo sapiens; identical to SEQ ID NO: 17021
  source 1..46: mol_type = genomic DNA

SEQ ID NO: 60450 - DNA, 46 bp, Homo sapiens; identical to SEQ ID NO: 23097
  source 1..46: mol_type = genomic DNA

SEQ ID NO: 60451 - DNA, 37 bp, Homo sapiens; identical to SEQ ID NO: 24900
  source 1..37: mol_type = genomic DNA

SEQ ID NO: 60452 - DNA, 35 bp, Homo sapiens; identical to SEQ ID NO: 28571
  source 1..35: mol_type = genomic DNA

SEQ ID NO: 60453 - DNA, 34 bp, Homo sapiens; identical to SEQ ID NO: 29549
  source 1..34: mol_type = genomic DNA

SEQ ID NO: 60454 - DNA, 48 bp, Homo sapiens; identical to SEQ ID NO: 30101
  source 1..48: mol_type = genomic DNA

SEQ ID NO: 60455 - DNA, 34 bp, Homo sapiens; identical to SEQ ID NO: 30584
  source 1..34: mol_type = genomic DNA

SEQ ID NO: 60456 - DNA, 31 bp, Homo sapiens; identical to SEQ ID NO: 131
  source 1..31: mol_type = genomic DNA

SEQ ID NO: 60457 - DNA, 48 bp, Homo sapiens; identical to SEQ ID NO: 2836
  source 1..48: mol_type = genomic DNA

SEQ ID NO: 60458 - DNA, 31 bp, Homo sapiens; identical to SEQ ID NO: 2978
  source 1..31: mol_type = genomic DNA

SEQ ID NO: 60459 - DNA, 48 bp, Homo sapiens; identical to SEQ ID NO: 5318
  source 1..48: mol_type = genomic DNA

SEQ ID NO: 60460 - DNA, 36 bp, Homo sapiens; identical to SEQ ID NO: 9299
  source 1..36: mol_type = genomic DNA

SEQ ID NO: 60461 - DNA, 48 bp, Homo sapiens; identical to SEQ ID NO: 10367
  source 1..48: mol_type = genomic DNA

SEQ ID NO: 60462 - DNA, 44 bp, Homo sapiens; identical to SEQ ID NO: 14399
  source 1..44: mol_type = genomic DNA

SEQ ID NO: 60463 - DNA, 16 bp, Homo sapiens
  source 1..16: mol_type = genomic DNA
cttaatctcagggtcg

SEQ ID NO: 60464 - DNA, 20 bp, Homo sapiens
  source 1..20: mol_type = genomic DNA
cttaggagatttcaacttaa

SEQ ID NO: 60465 - DNA, 33 bp, Homo sapiens; identical to SEQ ID NO: 14966
  source 1..33: mol_type = genomic DNA

SEQ ID NO: 60466 - DNA, 34 bp, Homo sapiens; identical to SEQ ID NO: 19196
  source 1..34: mol_type = genomic DNA

SEQ ID NO: 60467 - DNA, 23 bp, Homo sapiens
  source 1..23: mol_type = genomic DNA
gtagagcatgagactcttaatct

SEQ ID NO: 60468 - DNA, 32 bp, Homo sapiens; identical to SEQ ID NO: 21185
  source 1..32: mol_type = genomic DNA

SEQ ID NO: 60469 - DNA, 34 bp, Homo sapiens; identical to SEQ ID NO: 23053
  source 1..34: mol_type = genomic DNA

SEQ ID NO: 60470 - DNA, 34 bp, Homo sapiens; identical to SEQ ID NO: 25300
  source 1..34: mol_type = genomic DNA

SEQ ID NO: 60471 - DNA, 34 bp, Homo sapiens; identical to SEQ ID NO: 25424
  source 1..34: mol_type = genomic DNA

SEQ ID NO: 60472 - DNA, 35 bp, Homo sapiens; identical to SEQ ID NO: 28919
  source 1..35: mol_type = genomic DNA

SEQ ID NO: 60473 - DNA, 48 bp, Homo sapiens; identical to SEQ ID NO: 29231
  source 1..48: mol_type = genomic DNA

SEQ ID NO: 60474 - DNA, 31 bp, Homo sapiens; identical to SEQ ID NO: 29261
  source 1..31: mol_type = genomic DNA

SEQ ID NO: 60475 - DNA, 32 bp, Homo sapiens; identical to SEQ ID NO: 415
  source 1..32: mol_type = genomic DNA

SEQ ID NO: 60476 - DNA, 31 bp, Homo sapiens; identical to SEQ ID NO: 1153
  source 1..31: mol_type = genomic DNA

SEQ ID NO: 60477 - DNA, 27 bp, Homo sapiens
  source 1..27: mol_type = genomic DNA
aagagaaccaacacctctttacagtga

SEQ ID NO: 60478 - DNA, 33 bp, Homo sapiens; identical to SEQ ID NO: 2572
  source 1..33: mol_type = genomic DNA

SEQ ID NO: 60479 - DNA, 33 bp, Homo sapiens; identical to SEQ ID NO: 3238
  source 1..33: mol_type = genomic DNA

SEQ ID NO: 60480 - DNA, 26 bp, Homo sapiens
  source 1..26: mol_type = genomic DNA
agaggcttacgaccccttatttaccc

SEQ ID NO: 60481 - DNA, 48 bp, Homo sapiens; identical to SEQ ID NO: 7156
  source 1..48: mol_type = genomic DNA

SEQ ID NO: 60482 - DNA, 29 bp, Homo sapiens
  source 1..29: mol_type = genomic DNA
caacagaggcttacgaccccttatttacc

SEQ ID NO: 60483 - DNA, 34 bp, Homo sapiens; identical to SEQ ID NO: 17216
  source 1..34: mol_type = genomic DNA

SEQ ID NO: 60484 - DNA, 31 bp, Homo sapiens; identical to SEQ ID NO: 18539
  source 1..31: mol_type = genomic DNA

SEQ ID NO: 60485 - DNA, 33 bp, Homo sapiens; identical to SEQ ID NO: 19195
  source 1..33: mol_type = genomic DNA

SEQ ID NO: 60486 - DNA, 34 bp, Homo sapiens; identical to SEQ ID NO: 20409
  source 1..34: mol_type = genomic DNA

SEQ ID NO: 60487 - DNA, 32 bp, Homo sapiens; identical to SEQ ID NO: 23654
  source 1..32: mol_type = genomic DNA

SEQ ID NO: 60488 - DNA, 48 bp, Homo sapiens; identical to SEQ ID NO: 26979
  source 1..48: mol_type = genomic DNA

SEQ ID NO: 60489 - DNA, 35 bp, Homo sapiens; identical to SEQ ID NO: 30464
  source 1..35: mol_type = genomic DNA

SEQ ID NO: 60490 - DNA, 31 bp, Homo sapiens; identical to SEQ ID NO: 3827
  source 1..31: mol_type = genomic DNA

SEQ ID NO: 60491 - DNA, 48 bp, Homo sapiens; identical to SEQ ID NO: 4619
  source 1..48: mol_type = genomic DNA

SEQ ID NO: 60492 - DNA, 23 bp, Homo sapiens
  source 1..23: mol_type = genomic DNA
agtctcataatctgaaggtcgtg

SEQ ID NO: 60493 - DNA, 37 bp, Homo sapiens; identical to SEQ ID NO: 6215
  source 1..37: mol_type = genomic DNA

SEQ ID NO: 60494 - DNA, 48 bp, Homo sapiens; identical to SEQ ID NO: 7997
  source 1..48: mol_type = genomic DNA

SEQ ID NO: 60495 - DNA, 33 bp, Homo sapiens; identical to SEQ ID NO: 8308
  source 1..33: mol_type = genomic DNA

SEQ ID NO: 60496 - DNA, 16 bp, Homo sapiens
  source 1..16: mol_type = genomic DNA
cataatctgaaggtcg

SEQ ID NO: 60497 - DNA, 26 bp, Homo sapiens
  source 1..26: mol_type = genomic DNA
cggtagagcatgggactcttaatccc

SEQ ID NO: 60498 - DNA, 48 bp, Homo sapiens; identical to SEQ ID NO: 15058
  source 1..48: mol_type = genomic DNA

SEQ ID NO: 60499 - DNA, 25 bp, Homo sapiens
  source 1..25: mol_type = genomic DNA
gaattgcaaattcgaagaagcagct

SEQ ID NO: 60500 - DNA, 28 bp, Homo sapiens
  source 1..28: mol_type = genomic DNA
gatgggttcgattctcatagtcctagcc

SEQ ID NO: 60501 - DNA, 34 bp, Homo sapiens; identical to SEQ ID NO: 20393
  source 1..34: mol_type = genomic DNA

SEQ ID NO: 60502 - DNA, 28 bp, Homo sapiens
  source 1..28: mol_type = genomic DNA
gtccgcgtgggttcgaaccccactcctg

SEQ ID NO: 60503 - DNA, 33 bp, Homo sapiens; identical to SEQ ID NO: 23692
  source 1..33: mol_type = genomic DNA

SEQ ID NO: 60504 - DNA, 26 bp, Homo sapiens
  source 1..26: mol_type = genomic DNA
tgcaggttcgagtcctgccgcggtcg

SEQ ID NO: 60505 - DNA, 26 bp, Homo sapiens
  source 1..26: mol_type = genomic DNA
tttgacaacattcaaaaaagagtacc

SEQ ID NO: 60506 - DNA, 18 bp, Homo sapiens
  source 1..18: mol_type = genomic DNA
aaaccggagatgaaaacc

SEQ ID NO: 60507 - DNA, 16 bp, Homo sapiens
  source 1..16: mol_type = genomic DNA
aaagcacccaacttac

SEQ ID NO: 60508 - DNA, 26 bp, Homo sapiens
  source 1..26: mol_type = genomic DNA
agaaatatgtctgataaaagagttac

SEQ ID NO: 60509 - DNA, 31 bp, Homo sapiens; identical to SEQ ID NO: 5004
  source 1..31: mol_type = genomic DNA

SEQ ID NO: 60510 - DNA, 17 bp, Homo sapiens
  source 1..17: mol_type = genomic DNA
ggggttcgattccttcc

SEQ ID NO: 60511 - DNA, 38 bp, Homo sapiens; identical to SEQ ID NO: 19223
  source 1..38: mol_type = genomic DNA

SEQ ID NO: 60512 - DNA, 29 bp, Homo sapiens
  source 1..29: mol_type = genomic DNA
gtggtagaattctcgcctgccacgcggga

SEQ ID NO: 60513 - DNA, 41 bp, Homo sapiens; identical to SEQ ID NO: 21569
  source 1..41: mol_type = genomic DNA

SEQ ID NO: 60514 - DNA, 16 bp, Homo sapiens
  source 1..16: mol_type = genomic DNA
taactagttttgacaa

SEQ ID NO: 60515 - DNA, 30 bp, Homo sapiens; identical to SEQ ID NO: 23689
  source 1..30: mol_type = genomic DNA

SEQ ID NO: 60516 - DNA, 32 bp, Homo sapiens; identical to SEQ ID NO: 23710
  source 1..32: mol_type = genomic DNA

SEQ ID NO: 60517 - DNA, 27 bp, Homo sapiens
  source 1..27: mol_type = genomic DNA
tcagctaaataagctatcgggcccata

SEQ ID NO: 60518 - DNA, 31 bp, Homo sapiens; identical to SEQ ID NO: 25127
  source 1..31: mol_type = genomic DNA

SEQ ID NO: 60519 - DNA, 42 bp, Homo sapiens; identical to SEQ ID NO: 25542
  source 1..42: mol_type = genomic DNA

SEQ ID NO: 60520 - DNA, 17 bp, Homo sapiens
  source 1..17: mol_type = genomic DNA
tcttaatctcagggtcg

SEQ ID NO: 60521 - DNA, 17 bp, Homo sapiens
  source 1..17: mol_type = genomic DNA
ttaactagttttgacaa

SEQ ID NO: 60522 - DNA, 36 bp, Homo sapiens; identical to SEQ ID NO: 30077
  source 1..36: mol_type = genomic DNA

SEQ ID NO: 60523 - DNA, 26 bp, Homo sapiens
  source 1..26: mol_type = genomic DNA
agggattgtgggttcgagtcccatct

SEQ ID NO: 60524 - DNA, 37 bp, Homo sapiens; identical to SEQ ID NO: 11954
  source 1..37: mol_type = genomic DNA

SEQ ID NO: 60525 - DNA, 43 bp, Homo sapiens; identical to SEQ ID NO: 15425
  source 1..43: mol_type = genomic DNA

SEQ ID NO: 60526 - DNA, 24 bp, Homo sapiens
  source 1..24: mol_type = genomic DNA
gcgttcgattcccggtcagggaac

SEQ ID NO: 60527 - DNA, 41 bp, Homo sapiens; identical to SEQ ID NO: 30929
  source 1..41: mol_type = genomic DNA

SEQ ID NO: 60528 - DNA, 29 bp, Homo sapiens
  source 1..29: mol_type = genomic DNA
ccagatcagaaggctgcgtgttcgaatca

SEQ ID NO: 60529 - DNA, 16 bp, Homo sapiens
  source 1..16: mol_type = genomic DNA
acttataatgccgagg

SEQ ID NO: 60530 - DNA, 16 bp, Homo sapiens
  source 1..16: mol_type = genomic DNA
ctcagtcggtagagct

SEQ ID NO: 60531 - DNA, 21 bp, Homo sapiens
  source 1..21: mol_type = genomic DNA
cggtttgggtccgagaggtcc

SEQ ID NO: 60532 - DNA, 45 bp, Homo sapiens; identical to SEQ ID NO: 28180
  source 1..45: mol_type = genomic DNA

SEQ ID NO: 60533 - DNA, 28 bp, Homo sapiens
  source 1..28: mol_type = genomic DNA
ccagggttcaagtccctgtccaggcgcc

SEQ ID NO: 60534 - DNA, 43 bp, Homo sapiens; identical to SEQ ID NO: 9747
  source 1..43: mol_type = genomic DNA

SEQ ID NO: 60535 - DNA, 18 bp, Homo sapiens
  source 1..18: mol_type = genomic DNA
ggatggccgagtggtcta

SEQ ID NO: 60536 - DNA, 16 bp, Homo sapiens
  source 1..16: mol_type = genomic DNA
cagcgatccgagttcg

SEQ ID NO: 60537 - DNA, 25 bp, Homo sapiens
  source 1..25: mol_type = genomic DNA
tggcagagcccggtaatcgcataaa

SEQ ID NO: 60538 - DNA, 29 bp, Homo sapiens
  source 1..29: mol_type = genomic DNA
caaaacgaatgatttcgactcattaaatt

SEQ ID NO: 60539 - DNA, 16 bp, Homo sapiens
  source 1..16: mol_type = genomic DNA
cagagcatttgactgc

SEQ ID NO: 60540 - DNA, 18 bp, Homo sapiens
  source 1..18: mol_type = genomic DNA
caaattcgaagaagcagc

SEQ ID NO: 60541 - DNA, 19 bp, Homo sapiens
  source 1..19: mol_type = genomic DNA
acagaccaagagccttcaa

SEQ ID NO: 60542 - DNA, 23 bp, Homo sapiens
  source 1..23: mol_type = genomic DNA
tagtaccgttaacttccaattaa

SEQ ID NO: 60543 - DNA, 36 bp, Homo sapiens; identical to SEQ ID NO: 13832
  source 1..36: mol_type = genomic DNA

SEQ ID NO: 60544 - DNA, 27 bp, Homo sapiens
  source 1..27: mol_type = genomic DNA
gtgtagtggttatcacgtctgctttac

SEQ ID NO: 60545 - DNA, 25 bp, Homo sapiens
  source 1..25: mol_type = genomic DNA
ttagaatcttagctttgggtgctaa

SEQ ID NO: 60546 - DNA, 33 bp, Homo sapiens; identical to SEQ ID NO: 2572
  source 1..33: mol_type = genomic DNA

SEQ ID NO: 60547 - DNA, 20 bp, Homo sapiens
  source 1..20: mol_type = genomic DNA
accagctttggggggttcga

SEQ ID NO: 60548 - DNA, 36 bp, Homo sapiens; identical to SEQ ID NO: 28964
  source 1..36: mol_type = genomic DNA

SEQ ID NO: 60549 - DNA, 32 bp, Homo sapiens; identical to SEQ ID NO: 26546
  source 1..32: mol_type = genomic DNA

SEQ ID NO: 60550 - DNA, 17 bp, Homo sapiens
  source 1..17: mol_type = genomic DNA
agttctggtctccggat

SEQ ID NO: 60551 - DNA, 32 bp, Homo sapiens; identical to SEQ ID NO: 1354
  source 1..32: mol_type = genomic DNA

SEQ ID NO: 60552 - DNA, 34 bp, Homo sapiens; identical to SEQ ID NO: 5225
  source 1..34: mol_type = genomic DNA

SEQ ID NO: 60553 - DNA, 41 bp, Homo sapiens; identical to SEQ ID NO: 4046
  source 1..41: mol_type = genomic DNA

SEQ ID NO: 60554 - DNA, 16 bp, Homo sapiens
  source 1..16: mol_type = genomic DNA
tacaacgatggttttt

SEQ ID NO: 60555 - DNA, 32 bp, Homo sapiens; identical to SEQ ID NO: 10280
  source 1..32: mol_type = genomic DNA

SEQ ID NO: 60556 - DNA, 21 bp, Homo sapiens
  source 1..21: mol_type = genomic DNA
tttcgactcattaaattatga

SEQ ID NO: 60557 - DNA, 31 bp, Homo sapiens; identical to SEQ ID NO: 9919
  source 1..31: mol_type = genomic DNA

SEQ ID NO: 60558 - DNA, 31 bp, Homo sapiens; identical to SEQ ID NO: 24837
  source 1..31: mol_type = genomic DNA

SEQ ID NO: 60559 - DNA, 40 bp, Homo sapiens; identical to SEQ ID NO: 1023
  source 1..40: mol_type = genomic DNA

SEQ ID NO: 60560 - DNA, 33 bp, Homo sapiens; identical to SEQ ID NO: 15078
  source 1..33: mol_type = genomic DNA

SEQ ID NO: 60561 - DNA, 19 bp, Homo sapiens
  source 1..19: mol_type = genomic DNA
tcgggcccataccccgaaa

SEQ ID NO: 60562 - DNA, 34 bp, Homo sapiens; identical to SEQ ID NO: 18184
  source 1..34: mol_type = genomic DNA

SEQ ID NO: 60563 - DNA, 37 bp, Homo sapiens; identical to SEQ ID NO: 29116
  source 1..37: mol_type = genomic DNA

SEQ ID NO: 60564 - DNA, 35 bp, Homo sapiens; identical to SEQ ID NO: 25357
  source 1..35: mol_type = genomic DNA

SEQ ID NO: 60565 - DNA, 44 bp, Homo sapiens; identical to SEQ ID NO: 29690
  source 1..44: mol_type = genomic DNA

SEQ ID NO: 60566 - DNA, 16 bp, Homo sapiens
  source 1..16: mol_type = genomic DNA
aggtggcacggagaat

SEQ ID NO: 60567 - DNA, 30 bp, Homo sapiens; identical to SEQ ID NO: 8843
  source 1..30: mol_type = genomic DNA

SEQ ID NO: 60568 - DNA, 20 bp, Homo sapiens
  source 1..20: mol_type = genomic DNA
tacagaccaagagccttcaa

SEQ ID NO: 60569 - DNA, 40 bp, Homo sapiens; identical to SEQ ID NO: 15938
  source 1..40: mol_type = genomic DNA

SEQ ID NO: 60570 - DNA, 31 bp, Homo sapiens; identical to SEQ ID NO: 15076
  source 1..31: mol_type = genomic DNA

SEQ ID NO: 60571 - DNA, 29 bp, Homo sapiens
  source 1..29: mol_type = genomic DNA
ttggtctaggggtatgattctcgcttcgg

SEQ ID NO: 60572 - DNA, 19 bp, Homo sapiens
  source 1..19: mol_type = genomic DNA
aaactttacagtcagaggt

SEQ ID NO: 60573 - DNA, 25 bp, Homo sapiens
  source 1..25: mol_type = genomic DNA
acttccaattaactagttttgacaa

SEQ ID NO: 60574 - DNA, 16 bp, Homo sapiens
  source 1..16: mol_type = genomic DNA
gtcgcagtctcccctg

SEQ ID NO: 60575 - DNA, 22 bp, Homo sapiens
  source 1..22: mol_type = genomic DNA
gtgtgataggtggcacggagaa

SEQ ID NO: 60576 - DNA, 34 bp, Homo sapiens; identical to SEQ ID NO: 18359
  source 1..34: mol_type = genomic DNA

SEQ ID NO: 60577 - DNA, 31 bp, Homo sapiens; identical to SEQ ID NO: 8811
  source 1..31: mol_type = genomic DNA

SEQ ID NO: 60578 - DNA, 43 bp, Homo sapiens; identical to SEQ ID NO: 2326
  source 1..43: mol_type = genomic DNA

SEQ ID NO: 60579 - DNA, 39 bp, Homo sapiens; identical to SEQ ID NO: 29118
  source 1..39: mol_type = genomic DNA

SEQ ID NO: 60580 - DNA, 20 bp, Homo sapiens
  source 1..20: mol_type = genomic DNA
tgatagagtaaataatagga

SEQ ID NO: 60581 - DNA, 18 bp, Homo sapiens
  source 1..18: mol_type = genomic DNA
aggtgattttcatattga

SEQ ID NO: 60582 - DNA, 32 bp, Homo sapiens; identical to SEQ ID NO: 25422
  source 1..32: mol_type = genomic DNA

SEQ ID NO: 60583 - DNA, 31 bp, Homo sapiens; identical to SEQ ID NO: 10266
  source 1..31: mol_type = genomic DNA

SEQ ID NO: 60584 - DNA, 26 bp, Homo sapiens
  source 1..26: mol_type = genomic DNA
gctcagtcggtagagcatgagactct

SEQ ID NO: 60585 - DNA, 16 bp, Homo sapiens
  source 1..16: mol_type = genomic DNA
ttgattagggtgctta

SEQ ID NO: 60586 - DNA, 28 bp, Homo sapiens
  source 1..28: mol_type = genomic DNA
agtgtagtggttatcacgttcgcctcac

SEQ ID NO: 60587 - DNA, 31 bp, Homo sapiens; identical to SEQ ID NO: 10276
  source 1..31: mol_type = genomic DNA

SEQ ID NO: 60588 - DNA, 26 bp, Homo sapiens
  source 1..26: mol_type = genomic DNA
gtagtggttatcacgttcgcctcaca

SEQ ID NO: 60589 - DNA, 30 bp, Homo sapiens; identical to SEQ ID NO: 8155
  source 1..30: mol_type = genomic DNA

SEQ ID NO: 60590 - DNA, 27 bp, Homo sapiens
  source 1..27: mol_type = genomic DNA
gtgtagtggttatcacgttcgcctcac

SEQ ID NO: 60591 - DNA, 35 bp, Homo sapiens; identical to SEQ ID NO: 23869
  source 1..35: mol_type = genomic DNA

SEQ ID NO: 60592 - DNA, 30 bp, Homo sapiens; identical to SEQ ID NO: 5838
  source 1..30: mol_type = genomic DNA

SEQ ID NO: 60593 - DNA, 21 bp, Homo sapiens
  source 1..21: mol_type = genomic DNA
acaaaacgaatgatttcgact

SEQ ID NO: 60594 - DNA, 25 bp, Homo sapiens
  source 1..25: mol_type = genomic DNA
gtagtggttatcacgttcgcctcac

SEQ ID NO: 60595 - DNA, 27 bp, Homo sapiens
  source 1..27: mol_type = genomic DNA
gaatctgacaacagaggcttacgaccc

SEQ ID NO: 60596 - DNA, 33 bp, Homo sapiens; identical to SEQ ID NO: 30108
  source 1..33: mol_type = genomic DNA

SEQ ID NO: 60597 - DNA, 22 bp, Homo sapiens
  source 1..22: mol_type = genomic DNA
aggggtatgattctcgctttgg

SEQ ID NO: 60598 - DNA, 38 bp, Homo sapiens; identical to SEQ ID NO: 26871
  source 1..38: mol_type = genomic DNA

SEQ ID NO: 60599 - DNA, 30 bp, Homo sapiens; identical to SEQ ID NO: 29619
  source 1..30: mol_type = genomic DNA

SEQ ID NO: 60600 - DNA, 18 bp, Homo sapiens
  source 1..18: mol_type = genomic DNA
atcgggcccataccccga

SEQ ID NO: 60601 - DNA, 24 bp, Homo sapiens
  source 1..24: mol_type = genomic DNA
tagaatcttagctttgggtgctaa

SEQ ID NO: 60602 - DNA, 18 bp, Homo sapiens
  source 1..18: mol_type = genomic DNA
ttaagagaaccaacacct

SEQ ID NO: 60603 - DNA, 29 bp, Homo sapiens
  source 1..29: mol_type = genomic DNA
ccgtagtgtagcggttatcacattcgcct

SEQ ID NO: 60604 - DNA, 17 bp, Homo sapiens
  source 1..17: mol_type = genomic DNA
ttaattaaagtggctga

SEQ ID NO: 60605 - DNA, 34 bp, Homo sapiens; identical to SEQ ID NO: 18330
  source 1..34: mol_type = genomic DNA

SEQ ID NO: 60606 - DNA, 29 bp, Homo sapiens
  source 1..29: mol_type = genomic DNA
ttggtctaggggtatgattctcgctttgg

SEQ ID NO: 60607 - DNA, 40 bp, Homo sapiens; identical to SEQ ID NO: 23636
  source 1..40: mol_type = genomic DNA

SEQ ID NO: 60608 - DNA, 34 bp, Homo sapiens; identical to SEQ ID NO: 18374
  source 1..34: mol_type = genomic DNA

SEQ ID NO: 60609 - DNA, 29 bp, Homo sapiens
  source 1..29: mol_type = genomic DNA
ttggtctaggggtatgattctcggtttgg

SEQ ID NO: 60610 - DNA, 34 bp, Homo sapiens; identical to SEQ ID NO: 30109
  source 1..34: mol_type = genomic DNA

SEQ ID NO: 60611 - DNA, 33 bp, Homo sapiens; identical to SEQ ID NO: 8807
  source 1..33: mol_type = genomic DNA

SEQ ID NO: 60612 - DNA, 31 bp, Homo sapiens; identical to SEQ ID NO: 2705
  source 1..31: mol_type = genomic DNA

SEQ ID NO: 60613 - DNA, 37 bp, Homo sapiens; identical to SEQ ID NO: 16689
  source 1..37: mol_type = genomic DNA

SEQ ID NO: 60614 - DNA, 28 bp, Homo sapiens
  source 1..28: mol_type = genomic DNA
gatgggttcgattctcatagtcctagcc

SEQ ID NO: 60615 - DNA, 33 bp, Homo sapiens; identical to SEQ ID NO: 25052
  source 1..33: mol_type = genomic DNA

SEQ ID NO: 60616 - DNA, 16 bp, Homo sapiens
  source 1..16: mol_type = genomic DNA
ctcccggtatgggaac

SEQ ID NO: 60617 - DNA, 41 bp, Homo sapiens; identical to SEQ ID NO: 29311
  source 1..41: mol_type = genomic DNA

SEQ ID NO: 60618 - DNA, 31 bp, Homo sapiens; identical to SEQ ID NO: 9705
  source 1..31: mol_type = genomic DNA

SEQ ID NO: 60619 - DNA, 32 bp, Homo sapiens; identical to SEQ ID NO: 9679
  source 1..32: mol_type = genomic DNA

SEQ ID NO: 60620 - DNA, 18 bp, Homo sapiens
  source 1..18: mol_type = genomic DNA
aagtcccattggtctagc

SEQ ID NO: 60621 - DNA, 35 bp, Homo sapiens; identical to SEQ ID NO: 30585
  source 1..35: mol_type = genomic DNA

SEQ ID NO: 60622 - DNA, 30 bp, Homo sapiens; identical to SEQ ID NO: 12289
  source 1..30: mol_type = genomic DNA

SEQ ID NO: 60623 - DNA, 33 bp, Homo sapiens; identical to SEQ ID NO: 22344
  source 1..33: mol_type = genomic DNA

SEQ ID NO: 60624 - DNA, 31 bp, Homo sapiens; identical to SEQ ID NO: 19350
  source 1..31: mol_type = genomic DNA

SEQ ID NO: 60625 - DNA, 28 bp, Homo sapiens
  source 1..28: mol_type = genomic DNA
cgccaaggtcgcgggttcgatccccgta

SEQ ID NO: 60626 - DNA, 45 bp, Homo sapiens; identical to SEQ ID NO: 25383
  source 1..45: mol_type = genomic DNA

SEQ ID NO: 60627 - DNA, 36 bp, Homo sapiens; identical to SEQ ID NO: 6797
  source 1..36: mol_type = genomic DNA

SEQ ID NO: 60628 - DNA, 32 bp, Homo sapiens; identical to SEQ ID NO: 14910
  source 1..32: mol_type = genomic DNA

SEQ ID NO: 60629 - DNA, 28 bp, Homo sapiens
  source 1..28: mol_type = genomic DNA
atcagattgtgaatctgacaacagaggc

SEQ ID NO: 60630 - DNA, 29 bp, Homo sapiens
  source 1..29: mol_type = genomic DNA
tttgtgggtttaagtcccattggtctagc

SEQ ID NO: 60631 - DNA, 28 bp, Homo sapiens
  source 1..28: mol_type = genomic DNA
ttttgacaacattcaaaaaagagtacca

SEQ ID NO: 60632 - DNA, 39 bp, Homo sapiens; identical to SEQ ID NO: 10651
  source 1..39: mol_type = genomic DNA

SEQ ID NO: 60633 - DNA, 27 bp, Homo sapiens
  source 1..27: mol_type = genomic DNA
atgggttcgattctcatagtcctagcc

SEQ ID NO: 60634 - DNA, 31 bp, Homo sapiens; identical to SEQ ID NO: 23302
  source 1..31: mol_type = genomic DNA

SEQ ID NO: 60635 - DNA, 47 bp, Homo sapiens; identical to SEQ ID NO: 28927
  source 1..47: mol_type = genomic DNA

SEQ ID NO: 60636 - DNA, 34 bp, Homo sapiens; identical to SEQ ID NO: 30584
  source 1..34: mol_type = genomic DNA

SEQ ID NO: 60637 - DNA, 31 bp, Homo sapiens; identical to SEQ ID NO: 9021
  source 1..31: mol_type = genomic DNA

SEQ ID NO: 60638 - DNA, 47 bp, Homo sapiens; identical to SEQ ID NO: 7508
  source 1..47: mol_type = genomic DNA

SEQ ID NO: 60639 - DNA, 17 bp, Homo sapiens
  source 1..17: mol_type = genomic DNA
ggggttcgattccttcc

SEQ ID NO: 60640 - DNA, 23 bp, Homo sapiens
  source 1..23: mol_type = genomic DNA
aagttaaattataggctaaatcc

SEQ ID NO: 60641 - DNA, 45 bp, Homo sapiens; identical to SEQ ID NO: 23096
  source 1..45: mol_type = genomic DNA

SEQ ID NO: 60642 - DNA, 26 bp, Homo sapiens
  source 1..26: mol_type = genomic DNA
tttgacaacattcaaaaaagagtacc

SEQ ID NO: 60643 - DNA, 40 bp, Homo sapiens; identical to SEQ ID NO: 26818
  source 1..40: mol_type = genomic DNA

SEQ ID NO: 60644 - DNA, 38 bp, Homo sapiens; identical to SEQ ID NO: 14153
  source 1..38: mol_type = genomic DNA

SEQ ID NO: 60645 - DNA, 46 bp, Homo sapiens; identical to SEQ ID NO: 24991
  source 1..46: mol_type = genomic DNA

SEQ ID NO: 60646 - DNA, 35 bp, Homo sapiens; identical to SEQ ID NO: 28905
  source 1..35: mol_type = genomic DNA

SEQ ID NO: 60647 - DNA, 33 bp, Homo sapiens; identical to SEQ ID NO: 13202
  source 1..33: mol_type = genomic DNA

SEQ ID NO: 60648 - DNA, 36 bp, Homo sapiens; identical to SEQ ID NO: 10426
  source 1..36: mol_type = genomic DNA

SEQ ID NO: 60649 - DNA, 33 bp, Homo sapiens; identical to SEQ ID NO: 22967
  source 1..33: mol_type = genomic DNA

SEQ ID NO: 60650 - DNA, 31 bp, Homo sapiens; identical to SEQ ID NO: 835
  source 1..31: mol_type = genomic DNA

SEQ ID NO: 60651 - DNA, 38 bp, Homo sapiens; identical to SEQ ID NO: 9712
  source 1..38: mol_type = genomic DNA

SEQ ID NO: 60652 - DNA, 30 bp, Homo sapiens; identical to SEQ ID NO: 20938
  source 1..30: mol_type = genomic DNA

SEQ ID NO: 60653 - DNA, 27 bp, Homo sapiens
  source 1..27: mol_type = genomic DNA
aagagaaccaacacctctttacagtga

SEQ ID NO: 60654 - DNA, 25 bp, Homo sapiens
  source 1..25: mol_type = genomic DNA
ctatcgggcccataccccgaaaatg

SEQ ID NO: 60655 - DNA, 41 bp, Homo sapiens; identical to SEQ ID NO: 31016
  source 1..41: mol_type = genomic DNA

SEQ ID NO: 60656 - DNA, 34 bp, Homo sapiens; identical to SEQ ID NO: 23070
  source 1..34: mol_type = genomic DNA

SEQ ID NO: 60657 - DNA, 30 bp, Homo sapiens; identical to SEQ ID NO: 18538
  source 1..30: mol_type = genomic DNA

SEQ ID NO: 60658 - DNA, 31 bp, Homo sapiens; identical to SEQ ID NO: 8268
  source 1..31: mol_type = genomic DNA

SEQ ID NO: 60659 - DNA, 25 bp, Homo sapiens
  source 1..25: mol_type = genomic DNA
ttgtcaaagttaaattataggctaa

SEQ ID NO: 60660 - DNA, 31 bp, Homo sapiens; identical to SEQ ID NO: 27207
  source 1..31: mol_type = genomic DNA

SEQ ID NO: 60661 - DNA, 36 bp, Homo sapiens; identical to SEQ ID NO: 13205
  source 1..36: mol_type = genomic DNA

SEQ ID NO: 60662 - DNA, 38 bp, Homo sapiens; identical to SEQ ID NO: 8791
  source 1..38: mol_type = genomic DNA

SEQ ID NO: 60663 - DNA, 17 bp, Homo sapiens
  source 1..17: mol_type = genomic DNA
cgagccccacgttgggc

SEQ ID NO: 60664 - DNA, 38 bp, Homo sapiens; identical to SEQ ID NO: 8357
  source 1..38: mol_type = genomic DNA

SEQ ID NO: 60665 - DNA, 36 bp, Homo sapiens; identical to SEQ ID NO: 8596
  source 1..36: mol_type = genomic DNA

SEQ ID NO: 60666 - DNA, 16 bp, Homo sapiens
  source 1..16: mol_type = genomic DNA
aagacaggggttaggc

SEQ ID NO: 60667 - DNA, 34 bp, Homo sapiens; identical to SEQ ID NO: 15155
  source 1..34: mol_type = genomic DNA

SEQ ID NO: 60668 - DNA, 32 bp, Homo sapiens; identical to SEQ ID NO: 6849
  source 1..32: mol_type = genomic DNA

SEQ ID NO: 60669 - DNA, 31 bp, Homo sapiens; identical to SEQ ID NO: 17840
  source 1..31: mol_type = genomic DNA

SEQ ID NO: 60670 - DNA, 46 bp, Homo sapiens; identical to SEQ ID NO: 8234
  source 1..46: mol_type = genomic DNA

SEQ ID NO: 60671 - DNA, 16 bp, Homo sapiens
  source 1..16: mol_type = genomic DNA
gtcccttcgtggtcgc

SEQ ID NO: 60672 - DNA, 24 bp, Homo sapiens
  source 1..24: mol_type = genomic DNA
ttccaattaactagttttgacaac

SEQ ID NO: 60673 - DNA, 27 bp, Homo sapiens
  source 1..27: mol_type = genomic DNA
agaaatatgtctgataaaagagttact

SEQ ID NO: 60674 - DNA, 19 bp, Homo sapiens
  source 1..19: mol_type = genomic DNA
atctgaaggtcctgagttc

SEQ ID NO: 60675 - DNA, 43 bp, Homo sapiens; identical to SEQ ID NO: 4464
  source 1..43: mol_type = genomic DNA

SEQ ID NO: 60676 - DNA, 25 bp, Homo sapiens
  source 1..25: mol_type = genomic DNA
ccccgcgcaggttcgaatcctgccg

SEQ ID NO: 60677 - DNA, 37 bp, Homo sapiens; identical to SEQ ID NO: 2324
  source 1..37: mol_type = genomic DNA

SEQ ID NO: 60678 - DNA, 17 bp, Homo sapiens
  source 1..17: mol_type = genomic DNA
ttcccggccagggaacc

SEQ ID NO: 60679 - DNA, 40 bp, Homo sapiens; identical to SEQ ID NO: 14617
  source 1..40: mol_type = genomic DNA

SEQ ID NO: 60680 - DNA, 36 bp, Homo sapiens; identical to SEQ ID NO: 13729
  source 1..36: mol_type = genomic DNA

SEQ ID NO: 60681 - DNA, 36 bp, Homo sapiens; identical to SEQ ID NO: 784
  source 1..36: mol_type = genomic DNA

SEQ ID NO: 60682 - DNA, 39 bp, Homo sapiens; identical to SEQ ID NO: 6035
  source 1..39: mol_type = genomic DNA

SEQ ID NO: 60683 - DNA, 39 bp, Homo sapiens; identical to SEQ ID NO: 12513
  source 1..39: mol_type = genomic DNA

SEQ ID NO: 60684 - DNA, 26 bp, Homo sapiens
  source 1..26: mol_type = genomic DNA
ccccggttcgaaaccgggcggaaaca

SEQ ID NO: 60685 - DNA, 28 bp, Homo sapiens
  source 1..28: mol_type = genomic DNA
gtttaaacaaaacgaatgatttcgactc

SEQ ID NO: 60686 - DNA, 20 bp, Homo sapiens
  source 1..20: mol_type = genomic DNA
tcatatcattggtcgtggtt

SEQ ID NO: 60687 - DNA, 18 bp, Homo sapiens
  source 1..18: mol_type = genomic DNA
tcagggatgggttcgatt

SEQ ID NO: 60688 - DNA, 34 bp, Homo sapiens; identical to SEQ ID NO: 15168
  source 1..34: mol_type = genomic DNA

SEQ ID NO: 60689 - DNA, 38 bp, Homo sapiens; identical to SEQ ID NO: 19126
  source 1..38: mol_type = genomic DNA

SEQ ID NO: 60690 - DNA, 45 bp, Homo sapiens; identical to SEQ ID NO: 28219
  source 1..45: mol_type = genomic DNA

SEQ ID NO: 60691 - DNA, 33 bp, Homo sapiens; identical to SEQ ID NO: 30433
  source 1..33: mol_type = genomic DNA

SEQ ID NO: 60692 - DNA, 19 bp, Homo sapiens
  source 1..19: mol_type = genomic DNA
cgattcccggccaacgcac

SEQ ID NO: 60693 - DNA, 39 bp, Homo sapiens; identical to SEQ ID NO: 14693
  source 1..39: mol_type = genomic DNA

SEQ ID NO: 60694 - DNA, 44 bp, Homo sapiens; identical to SEQ ID NO: 23990
  source 1..44: mol_type = genomic DNA

SEQ ID NO: 60695 - DNA, 33 bp, Homo sapiens; identical to SEQ ID NO: 4184
  source 1..33: mol_type = genomic DNA

SEQ ID NO: 60696 - DNA, 39 bp, Homo sapiens; identical to SEQ ID NO: 7504
  source 1..39: mol_type = genomic DNA

SEQ ID NO: 60697 - DNA, 47 bp, Homo sapiens; identical to SEQ ID NO: 14567
  source 1..47: mol_type = genomic DNA

SEQ ID NO: 60698 - DNA, 31 bp, Homo sapiens; identical to SEQ ID NO: 14909
  source 1..31: mol_type = genomic DNA

SEQ ID NO: 60699 - DNA, 39 bp, Homo sapiens; identical to SEQ ID NO: 10735
  source 1..39: mol_type = genomic DNA

SEQ ID NO: 60700 - DNA, 40 bp, Homo sapiens; identical to SEQ ID NO: 17119
  source 1..40: mol_type = genomic DNA

SEQ ID NO: 60701 - DNA, 42 bp, Homo sapiens; identical to SEQ ID NO: 24384
  source 1..42: mol_type = genomic DNA

SEQ ID NO: 60702 - DNA, 46 bp, Homo sapiens; identical to SEQ ID NO: 19946
  source 1..46: mol_type = genomic DNA

SEQ ID NO: 60703 - DNA, 35 bp, Homo sapiens; identical to SEQ ID NO: 13154
  source 1..35: mol_type = genomic DNA

SEQ ID NO: 60704 - DNA, 35 bp, Homo sapiens; identical to SEQ ID NO: 30954
  source 1..35: mol_type = genomic DNA

SEQ ID NO: 60705 - DNA, 31 bp, Homo sapiens; identical to SEQ ID NO: 963
  source 1..31: mol_type = genomic DNA

SEQ ID NO: 60706 - DNA, 33 bp, Homo sapiens; identical to SEQ ID NO: 28596
  source 1..33: mol_type = genomic DNA

SEQ ID NO: 60707 - DNA, 40 bp, Homo sapiens; identical to SEQ ID NO: 12366
  source 1..40: mol_type = genomic DNA

SEQ ID NO: 60708 - DNA, 16 bp, Homo sapiens
  source 1..16: mol_type = genomic DNA
gtcccggcagagatgc

SEQ ID NO: 60709 - DNA, 34 bp, Homo sapiens; identical to SEQ ID NO: 18602
  source 1..34: mol_type = genomic DNA

SEQ ID NO: 60710 - DNA, 16 bp, Homo sapiens
  source 1..16: mol_type = genomic DNA
tcccatctggggtgcc

SEQ ID NO: 60711 - DNA, 23 bp, Homo sapiens
  source 1..23: mol_type = genomic DNA
ttccgggttcgagtcccggcgga

SEQ ID NO: 60712 - DNA, 28 bp, Homo sapiens
  source 1..28: mol_type = genomic DNA
gtccagggttcaagtccctgttcgggcg

SEQ ID NO: 60713 - DNA, 24 bp, Homo sapiens
  source 1..24: mol_type = genomic DNA
tccggatcagaagattgagggttc

SEQ ID NO: 60714 - DNA, 34 bp, Homo sapiens; identical to SEQ ID NO: 27002
  source 1..34: mol_type = genomic DNA

SEQ ID NO: 60715 - DNA, 39 bp, Homo sapiens; identical to SEQ ID NO: 20209
  source 1..39: mol_type = genomic DNA

SEQ ID NO: 60716 - DNA, 35 bp, Homo sapiens; identical to SEQ ID NO: 24921
  source 1..35: mol_type = genomic DNA

SEQ ID NO: 60717 - DNA, 40 bp, Homo sapiens; identical to SEQ ID NO: 1547
  source 1..40: mol_type = genomic DNA

SEQ ID NO: 60718 - DNA, 18 bp, Homo sapiens
  source 1..18: mol_type = genomic DNA
aaagctcacaagaactgc

SEQ ID NO: 60719 - DNA, 32 bp, Homo sapiens; identical to SEQ ID NO: 22436
  source 1..32: mol_type = genomic DNA

SEQ ID NO: 60720 - DNA, 37 bp, Homo sapiens; identical to SEQ ID NO: 19761
  source 1..37: mol_type = genomic DNA

SEQ ID NO: 60721 - DNA, 37 bp, Homo sapiens; identical to SEQ ID NO: 6215
  source 1..37: mol_type = genomic DNA

SEQ ID NO: 60722 - DNA, 40 bp, Homo sapiens; identical to SEQ ID NO: 21950
  source 1..40: mol_type = genomic DNA

SEQ ID NO: 60723 - DNA, 22 bp, Homo sapiens
  source 1..22: mol_type = genomic DNA
ttcgactcccggtatgggaacc

SEQ ID NO: 60724 - DNA, 19 bp, Homo sapiens
  source 1..19: mol_type = genomic DNA
tgaaaaagtcatggaggcc

SEQ ID NO: 60725 - DNA, 41 bp, Homo sapiens; identical to SEQ ID NO: 13897
  source 1..41: mol_type = genomic DNA

SEQ ID NO: 60726 - DNA, 33 bp, Homo sapiens; identical to SEQ ID NO: 3261
  source 1..33: mol_type = genomic DNA

SEQ ID NO: 60727 - DNA, 35 bp, Homo sapiens; identical to SEQ ID NO: 1297
  source 1..35: mol_type = genomic DNA

SEQ ID NO: 60728 - DNA, 26 bp, Homo sapiens
  source 1..26: mol_type = genomic DNA
ccagggttcaagtccctgttcaggcg

SEQ ID NO: 60729 - DNA, 46 bp, Homo sapiens; identical to SEQ ID NO: 16069
  source 1..46: mol_type = genomic DNA

SEQ ID NO: 60730 - DNA, 24 bp, Homo sapiens
  source 1..24: mol_type = genomic DNA
tcttagctttgggtgctaatggtg

SEQ ID NO: 60731 - DNA, 43 bp, Homo sapiens; identical to SEQ ID NO: 25210
  source 1..43: mol_type = genomic DNA

SEQ ID NO: 60732 - DNA, 32 bp, Homo sapiens; identical to SEQ ID NO: 26787
  source 1..32: mol_type = genomic DNA

SEQ ID NO: 60733 - DNA, 26 bp, Homo sapiens
  source 1..26: mol_type = genomic DNA
taacttccaattaactagttttgaca

SEQ ID NO: 60734 - DNA, 17 bp, Homo sapiens
  source 1..17: mol_type = genomic DNA
cttccaagcagttgacc

SEQ ID NO: 60735 - DNA, 26 bp, Homo sapiens
  source 1..26: mol_type = genomic DNA
agaggcttacgaccccttatttaccc

SEQ ID NO: 60736 - DNA, 33 bp, Homo sapiens; identical to SEQ ID NO: 10615
  source 1..33: mol_type = genomic DNA

SEQ ID NO: 60737 - DNA, 46 bp, Homo sapiens; identical to SEQ ID NO: 28926
  source 1..46: mol_type = genomic DNA

SEQ ID NO: 60738 - DNA, 47 bp, Homo sapiens; identical to SEQ ID NO: 3888
  source 1..47: mol_type = genomic DNA

SEQ ID NO: 60739 - DNA, 34 bp, Homo sapiens; identical to SEQ ID NO: 10335
  source 1..34: mol_type = genomic DNA

SEQ ID NO: 60740 - DNA, 21 bp, Homo sapiens
  source 1..21: mol_type = genomic DNA
accaaaacatcagattgtgaa

SEQ ID NO: 60741 - DNA, 27 bp, Homo sapiens
  source 1..27: mol_type = genomic DNA
caggagatcctgggttcgaatcccagc

SEQ ID NO: 60742 - DNA, 36 bp, Homo sapiens; identical to SEQ ID NO: 5207
  source 1..36: mol_type = genomic DNA

SEQ ID NO: 60743 - DNA, 42 bp, Homo sapiens; identical to SEQ ID NO: 16485
  source 1..42: mol_type = genomic DNA

SEQ ID NO: 60744 - DNA, 36 bp, Homo sapiens; identical to SEQ ID NO: 6374
  source 1..36: mol_type = genomic DNA

SEQ ID NO: 60745 - DNA, 45 bp, Homo sapiens; identical to SEQ ID NO: 1112
  source 1..45: mol_type = genomic DNA

SEQ ID NO: 60746 - DNA, 33 bp, Homo sapiens; identical to SEQ ID NO: 29168
  source 1..33: mol_type = genomic DNA

SEQ ID NO: 60747 - DNA, 16 bp, Homo sapiens
  source 1..16: mol_type = genomic DNA
ccagctttggggggtt

SEQ ID NO: 60748 - DNA, 19 bp, Homo sapiens
  source 1..19: mol_type = genomic DNA
taagctatcgggcccatac

SEQ ID NO: 60749 - DNA, 17 bp, Homo sapiens
  source 1..17: mol_type = genomic DNA
gtcaggatggccgagca

SEQ ID NO: 60750 - DNA, 39 bp, Homo sapiens; identical to SEQ ID NO: 17409
  source 1..39: mol_type = genomic DNA

SEQ ID NO: 60751 - DNA, 44 bp, Homo sapiens; identical to SEQ ID NO: 14846
  source 1..44: mol_type = genomic DNA

SEQ ID NO: 60752 - DNA, 17 bp, Homo sapiens
  source 1..17: mol_type = genomic DNA
gcagcgatggccgagtg

SEQ ID NO: 60753 - DNA, 32 bp, Homo sapiens; identical to SEQ ID NO: 4951
  source 1..32: mol_type = genomic DNA

SEQ ID NO: 60754 - DNA, 33 bp, Homo sapiens; identical to SEQ ID NO: 15590
  source 1..33: mol_type = genomic DNA

SEQ ID NO: 60755 - DNA, 41 bp, Homo sapiens; identical to SEQ ID NO: 12431
  source 1..41: mol_type = genomic DNA

SEQ ID NO: 60756 - DNA, 29 bp, Homo sapiens
  source 1..29: mol_type = genomic DNA
cgatccgagttcaaatctcggtgggacct

SEQ ID NO: 60757 - DNA, 43 bp, Homo sapiens; identical to SEQ ID NO: 21524
  source 1..43: mol_type = genomic DNA

SEQ ID NO: 60758 - DNA, 43 bp, Homo sapiens; identical to SEQ ID NO: 16964
  source 1..43: mol_type = genomic DNA

SEQ ID NO: 60759 - DNA, 44 bp, Homo sapiens; identical to SEQ ID NO: 17121
  source 1..44: mol_type = genomic DNA

SEQ ID NO: 60760 - DNA, 29 bp, Homo sapiens
  source 1..29: mol_type = genomic DNA
aagttaaattataggctaaatcctatata

SEQ ID NO: 60761 - DNA, 27 bp, Homo sapiens
  source 1..27: mol_type = genomic DNA
tgaatccagcgatccgagttcgagtct

SEQ ID NO: 60762 - DNA, 46 bp, Homo sapiens; identical to SEQ ID NO: 4928
  source 1..46: mol_type = genomic DNA

SEQ ID NO: 60763 - DNA, 26 bp, Homo sapiens
  source 1..26: mol_type = genomic DNA
tgggttcgaatcccacttctgacacc

SEQ ID NO: 60764 - DNA, 28 bp, Homo sapiens
  source 1..28: mol_type = genomic DNA
gtccgcgtgggttcgaaccccactcctg

SEQ ID NO: 60765 - DNA, 40 bp, Homo sapiens; identical to SEQ ID NO: 25616
  source 1..40: mol_type = genomic DNA

SEQ ID NO: 60766 - DNA, 34 bp, Homo sapiens; identical to SEQ ID NO: 16184
  source 1..34: mol_type = genomic DNA

SEQ ID NO: 60767 - DNA, 41 bp, Homo sapiens; identical to SEQ ID NO: 14156
  source 1..41: mol_type = genomic DNA

SEQ ID NO: 60768 - DNA, 33 bp, Homo sapiens; identical to SEQ ID NO: 22607
  source 1..33: mol_type = genomic DNA

SEQ ID NO: 60769 - DNA, 35 bp, Homo sapiens; identical to SEQ ID NO: 4339
  source 1..35: mol_type = genomic DNA

SEQ ID NO: 60770 - DNA, 29 bp, Homo sapiens
  source 1..29: mol_type = genomic DNA
aacagaggcttacgaccccttatttaccc

SEQ ID NO: 60771 - DNA, 36 bp, Homo sapiens; identical to SEQ ID NO: 20597
  source 1..36: mol_type = genomic DNA

SEQ ID NO: 60772 - DNA, 36 bp, Homo sapiens; identical to SEQ ID NO: 10963
  source 1..36: mol_type = genomic DNA

SEQ ID NO: 60773 - DNA, 16 bp, Homo sapiens
  source 1..16: mol_type = genomic DNA
agcttcaaacctgccg

SEQ ID NO: 60774 - DNA, 35 bp, Homo sapiens; identical to SEQ ID NO: 15776
  source 1..35: mol_type = genomic DNA

SEQ ID NO: 60775 - DNA, 38 bp, Homo sapiens; identical to SEQ ID NO: 28996
  source 1..38: mol_type = genomic DNA

SEQ ID NO: 60776 - DNA, 37 bp, Homo sapiens; identical to SEQ ID NO: 22497
  source 1..37: mol_type = genomic DNA

SEQ ID NO: 60777 - DNA, 29 bp, Homo sapiens
  source 1..29: mol_type = genomic DNA
tagctgccttccaagcagttgacccgggt

SEQ ID NO: 60778 - DNA, 34 bp, Homo sapiens; identical to SEQ ID NO: 8564
  source 1..34: mol_type = genomic DNA

SEQ ID NO: 60779 - DNA, 33 bp, Homo sapiens; identical to SEQ ID NO: 6194
  source 1..33: mol_type = genomic DNA

SEQ ID NO: 60780 - DNA, 32 bp, Homo sapiens; identical to SEQ ID NO: 8383
  source 1..32: mol_type = genomic DNA

SEQ ID NO: 60781 - DNA, 30 bp, Homo sapiens; identical to SEQ ID NO: 23107
  source 1..30: mol_type = genomic DNA

SEQ ID NO: 60782 - DNA, 26 bp, Homo sapiens
  source 1..26: mol_type = genomic DNA
caggttcgaatcctgttcgtgacgcc

SEQ ID NO: 60783 - DNA, 39 bp, Homo sapiens; identical to SEQ ID NO: 23075
  source 1..39: mol_type = genomic DNA

SEQ ID NO: 60784 - DNA, 47 bp, Homo sapiens; identical to SEQ ID NO: 24992
  source 1..47: mol_type = genomic DNA

SEQ ID NO: 60785 - DNA, 38 bp, Homo sapiens; identical to SEQ ID NO: 421
  source 1..38: mol_type = genomic DNA

SEQ ID NO: 60786 - DNA, 31 bp, Homo sapiens; identical to SEQ ID NO: 8541
  source 1..31: mol_type = genomic DNA

SEQ ID NO: 60787 - DNA, 36 bp, Homo sapiens; identical to SEQ ID NO: 2630
  source 1..36: mol_type = genomic DNA

SEQ ID NO: 60788 - DNA, 29 bp, Homo sapiens
  source 1..29: mol_type = genomic DNA
tgtgggttcgagtcccaccagagtcgcca

SEQ ID NO: 60789 - DNA, 37 bp, Homo sapiens; identical to SEQ ID NO: 24903
  source 1..37: mol_type = genomic DNA

SEQ ID NO: 60790 - DNA, 45 bp, Homo sapiens; identical to SEQ ID NO: 2802
  source 1..45: mol_type = genomic DNA

SEQ ID NO: 60791 - DNA, 34 bp, Homo sapiens; identical to SEQ ID NO: 9583
  source 1..34: mol_type = genomic DNA

SEQ ID NO: 60792 - DNA, 37 bp, Homo sapiens; identical to SEQ ID NO: 9966
  source 1..37: mol_type = genomic DNA

SEQ ID NO: 60793 - DNA, 25 bp, Homo sapiens
  source 1..25: mol_type = genomic DNA
tgggttcgaatcccagcggtgcctc

SEQ ID NO: 60794 - DNA, 35 bp, Homo sapiens; identical to SEQ ID NO: 4818
  source 1..35: mol_type = genomic DNA

SEQ ID NO: 60795 - DNA, 35 bp, Homo sapiens; identical to SEQ ID NO: 24910
  source 1..35: mol_type = genomic DNA

SEQ ID NO: 60796 - DNA, 45 bp, Homo sapiens; identical to SEQ ID NO: 2458
  source 1..45: mol_type = genomic DNA

SEQ ID NO: 60797 - DNA, 24 bp, Homo sapiens
  source 1..24: mol_type = genomic DNA
taagttgcaatacttaatttctgc

SEQ ID NO: 60798 - DNA, 45 bp, Homo sapiens; identical to SEQ ID NO: 28053
  source 1..45: mol_type = genomic DNA

SEQ ID NO: 60799 - DNA, 32 bp, Homo sapiens; identical to SEQ ID NO: 9706
  source 1..32: mol_type = genomic DNA

SEQ ID NO: 60800 - DNA, 32 bp, Homo sapiens; identical to SEQ ID NO: 25111
  source 1..32: mol_type = genomic DNA

SEQ ID NO: 60801 - DNA, 36 bp, Homo sapiens; identical to SEQ ID NO: 25358
  source 1..36: mol_type = genomic DNA

SEQ ID NO: 60802 - DNA, 35 bp, Homo sapiens; identical to SEQ ID NO: 23071
  source 1..35: mol_type = genomic DNA

SEQ ID NO: 60803 - DNA, 26 bp, Homo sapiens
  source 1..26: mol_type = genomic DNA
tccgagttcaaatctcggtgggacct

SEQ ID NO: 60804 - DNA, 18 bp, Homo sapiens
  source 1..18: mol_type = genomic DNA
aactgggcggaaacacca

SEQ ID NO: 60805 - DNA, 31 bp, Homo sapiens; identical to SEQ ID NO: 24589
  source 1..31: mol_type = genomic DNA

SEQ ID NO: 60806 - DNA, 38 bp, Homo sapiens; identical to SEQ ID NO: 7684
  source 1..38: mol_type = genomic DNA

SEQ ID NO: 60807 - DNA, 24 bp, Homo sapiens
  source 1..24: mol_type = genomic DNA
ccagggttcaagtccctgttcggg

SEQ ID NO: 60808 - DNA, 32 bp, Homo sapiens; identical to SEQ ID NO: 19777
  source 1..32: mol_type = genomic DNA

SEQ ID NO: 60809 - DNA, 17 bp, Homo sapiens
  source 1..17: mol_type = genomic DNA
tcctcacacggggcacc

SEQ ID NO: 60810 - DNA, 26 bp, Homo sapiens
  source 1..26: mol_type = genomic DNA
taagatggcagagcccggtaatcgca

SEQ ID NO: 60811 - DNA, 35 bp, Homo sapiens; identical to SEQ ID NO: 24953
  source 1..35: mol_type = genomic DNA

SEQ ID NO: 60812 - DNA, 35 bp, Homo sapiens; identical to SEQ ID NO: 8027
  source 1..35: mol_type = genomic DNA

SEQ ID NO: 60813 - DNA, 42 bp, Homo sapiens; identical to SEQ ID NO: 23770
  source 1..42: mol_type = genomic DNA

SEQ ID NO: 60814 - DNA, 16 bp, Homo sapiens
  source 1..16: mol_type = genomic DNA
cggatcagaagattgc

SEQ ID NO: 60815 - DNA, 44 bp, Homo sapiens; identical to SEQ ID NO: 22002
  source 1..44: mol_type = genomic DNA

SEQ ID NO: 60816 - DNA, 32 bp, Homo sapiens; identical to SEQ ID NO: 2964
  source 1..32: mol_type = genomic DNA

SEQ ID NO: 60817 - DNA, 36 bp, Homo sapiens; identical to SEQ ID NO: 9299
  source 1..36: mol_type = genomic DNA

SEQ ID NO: 60818 - DNA, 23 bp, Homo sapiens
  source 1..23: mol_type = genomic DNA
cgaggtgattttcatattgaatt

SEQ ID NO: 60819 - DNA, 19 bp, Homo sapiens
  source 1..19: mol_type = genomic DNA
tccccgcgcaggttcgaat

SEQ ID NO: 60820 - DNA, 23 bp, Homo sapiens
  source 1..23: mol_type = genomic DNA
atgtccgcgtgggttcgaacccc

SEQ ID NO: 60821 - DNA, 24 bp, Homo sapiens
  source 1..24: mol_type = genomic DNA
taggattcctggttttcacccagg

SEQ ID NO: 60822 - DNA, 38 bp, Homo sapiens; identical to SEQ ID NO: 14505
  source 1..38: mol_type = genomic DNA

SEQ ID NO: 60823 - DNA, 33 bp, Homo sapiens; identical to SEQ ID NO: 16891
  source 1..33: mol_type = genomic DNA

SEQ ID NO: 60824 - DNA, 33 bp, Homo sapiens; identical to SEQ ID NO: 24447
  source 1..33: mol_type = genomic DNA

SEQ ID NO: 60825 - DNA, 34 bp, Homo sapiens; identical to SEQ ID NO: 14080
  source 1..34: mol_type = genomic DNA

SEQ ID NO: 60826 - DNA, 33 bp, Homo sapiens; identical to SEQ ID NO: 18766
  source 1..33: mol_type = genomic DNA

SEQ ID NO: 60827 - DNA, 27 bp, Homo sapiens
  source 1..27: mol_type = genomic DNA
tatggtctagcggttaggattcctggt

SEQ ID NO: 60828 - DNA, 40 bp, Homo sapiens; identical to SEQ ID NO: 25305
  source 1..40: mol_type = genomic DNA

SEQ ID NO: 60829 - DNA, 44 bp, Homo sapiens; identical to SEQ ID NO: 28044
  source 1..44: mol_type = genomic DNA

SEQ ID NO: 60830 - DNA, 39 bp, Homo sapiens; identical to SEQ ID NO: 7909
  source 1..39: mol_type = genomic DNA

SEQ ID NO: 60831 - DNA, 33 bp, Homo sapiens; identical to SEQ ID NO: 12702
  source 1..33: mol_type = genomic DNA

SEQ ID NO: 60832 - DNA, 31 bp, Homo sapiens; identical to SEQ ID NO: 23709
  source 1..31: mol_type = genomic DNA

SEQ ID NO: 60833 - DNA, 17 bp, Homo sapiens
  source 1..17: mol_type = genomic DNA
aaccgagcggaaacacc

SEQ ID NO: 60834 - DNA, 35 bp, Homo sapiens; identical to SEQ ID NO: 9065
  source 1..35: mol_type = genomic DNA

SEQ ID NO: 60835 - DNA, 44 bp, Homo sapiens; identical to SEQ ID NO: 10204
  source 1..44: mol_type = genomic DNA

SEQ ID NO: 60836 - DNA, 24 bp, Homo sapiens
  source 1..24: mol_type = genomic DNA
cagtctcataatctgaaggtcgtg

SEQ ID NO: 60837 - DNA, 46 bp, Homo sapiens; identical to SEQ ID NO: 26924
  source 1..46: mol_type = genomic DNA

SEQ ID NO: 60838 - DNA, 36 bp, Homo sapiens; identical to SEQ ID NO: 6784
  source 1..36: mol_type = genomic DNA

SEQ ID NO: 60839 - DNA, 44 bp, Homo sapiens; identical to SEQ ID NO: 25115
  source 1..44: mol_type = genomic DNA

SEQ ID NO: 60840 - DNA, 42 bp, Homo sapiens; identical to SEQ ID NO: 5446
  source 1..42: mol_type = genomic DNA

SEQ ID NO: 60841 - DNA, 28 bp, Homo sapiens
  source 1..28: mol_type = genomic DNA
gttttgacaacattcaaaaaagagtacc

SEQ ID NO: 60842 - DNA, 28 bp, Homo sapiens
  source 1..28: mol_type = genomic DNA
attgtgggttcgagtcccatctggggtg

SEQ ID NO: 60843 - DNA, 18 bp, Homo sapiens
  source 1..18: mol_type = genomic DNA
aaccgagcggaaacacca

SEQ ID NO: 60844 - DNA, 33 bp, Homo sapiens; identical to SEQ ID NO: 25761
  source 1..33: mol_type = genomic DNA

SEQ ID NO: 60845 - DNA, 16 bp, Homo sapiens
  source 1..16: mol_type = genomic DNA
cccgggttcgactccc

SEQ ID NO: 60846 - DNA, 38 bp, Homo sapiens; identical to SEQ ID NO: 31188
  source 1..38: mol_type = genomic DNA

SEQ ID NO: 60847 - DNA, 17 bp, Homo sapiens
  source 1..17: mol_type = genomic DNA
tgatttcgactcattaa

SEQ ID NO: 60848 - DNA, 28 bp, Homo sapiens
  source 1..28: mol_type = genomic DNA
acgcgggagaccggggttcgattccccg

SEQ ID NO: 60849 - DNA, 24 bp, Homo sapiens
  source 1..24: mol_type = genomic DNA
ttccgtagtgtagcggttatcaca

SEQ ID NO: 60850 - DNA, 43 bp, Homo sapiens; identical to SEQ ID NO: 22582
  source 1..43: mol_type = genomic DNA

SEQ ID NO: 60851 - DNA, 41 bp, Homo sapiens; identical to SEQ ID NO: 19129
  source 1..41: mol_type = genomic DNA

SEQ ID NO: 60852 - DNA, 16 bp, Homo sapiens
  source 1..16: mol_type = genomic DNA
gtcgtgggttcgagcc

SEQ ID NO: 60853 - DNA, 45 bp, Homo sapiens; identical to SEQ ID NO: 2385
  source 1..45: mol_type = genomic DNA

SEQ ID NO: 60854 - DNA, 34 bp, Homo sapiens; identical to SEQ ID NO: 771
  source 1..34: mol_type = genomic DNA

SEQ ID NO: 60855 - DNA, 31 bp, Homo sapiens; identical to SEQ ID NO: 12547
  source 1..31: mol_type = genomic DNA

SEQ ID NO: 60856 - DNA, 24 bp, Homo sapiens
  source 1..24: mol_type = genomic DNA
tccaggttcgactcctggctggct

SEQ ID NO: 60857 - DNA, 47 bp, Homo sapiens; identical to SEQ ID NO: 221
  source 1..47: mol_type = genomic DNA

SEQ ID NO: 60858 - DNA, 46 bp, Homo sapiens; identical to SEQ ID NO: 17587
  source 1..46: mol_type = genomic DNA

SEQ ID NO: 60859 - DNA, 35 bp, Homo sapiens; identical to SEQ ID NO: 2611
  source 1..35: mol_type = genomic DNA

SEQ ID NO: 60860 - DNA, 34 bp, Homo sapiens; identical to SEQ ID NO: 5717
  source 1..34: mol_type = genomic DNA

SEQ ID NO: 60861 - DNA, 35 bp, Homo sapiens; identical to SEQ ID NO: 22803
  source 1..35: mol_type = genomic DNA

SEQ ID NO: 60862 - DNA, 21 bp, Homo sapiens
  source 1..21: mol_type = genomic DNA
agcgcattggacttctaattc

SEQ ID NO: 60863 - DNA, 44 bp, Homo sapiens; identical to SEQ ID NO: 28389
  source 1..44: mol_type = genomic DNA

SEQ ID NO: 60864 - DNA, 31 bp, Homo sapiens; identical to SEQ ID NO: 18409
  source 1..31: mol_type = genomic DNA

SEQ ID NO: 60865 - DNA, 21 bp, Homo sapiens
  source 1..21: mol_type = genomic DNA
tctcataatctgaaggtcgtg

SEQ ID NO: 60866 - DNA, 40 bp, Homo sapiens; identical to SEQ ID NO: 26346
  source 1..40: mol_type = genomic DNA

SEQ ID NO: 60867 - DNA, 40 bp, Homo sapiens; identical to SEQ ID NO: 538
  source 1..40: mol_type = genomic DNA

SEQ ID NO: 60868 - DNA, 34 bp, Homo sapiens; identical to SEQ ID NO: 27658
  source 1..34: mol_type = genomic DNA

SEQ ID NO: 60869 - DNA, 46 bp, Homo sapiens; identical to SEQ ID NO: 29176
  source 1..46: mol_type = genomic DNA

SEQ ID NO: 60870 - DNA, 47 bp, Homo sapiens; identical to SEQ ID NO: 29124
  source 1..47: mol_type = genomic DNA

SEQ ID NO: 60871 - DNA, 27 bp, Homo sapiens
  source 1..27: mol_type = genomic DNA
agtaagttgcaatacttaatttctgcc

SEQ ID NO: 60872 - DNA, 33 bp, Homo sapiens; identical to SEQ ID NO: 7166
  source 1..33: mol_type = genomic DNA

SEQ ID NO: 60873 - DNA, 34 bp, Homo sapiens; identical to SEQ ID NO: 23693
  source 1..34: mol_type = genomic DNA

SEQ ID NO: 60874 - DNA, 23 bp, Homo sapiens
  source 1..23: mol_type = genomic DNA
gagttcgaatctcggtgggacct

SEQ ID NO: 60875 - DNA, 32 bp, Homo sapiens; identical to SEQ ID NO: 13255
  source 1..32: mol_type = genomic DNA

SEQ ID NO: 60876 - DNA, 34 bp, Homo sapiens; identical to SEQ ID NO: 18144
  source 1..34: mol_type = genomic DNA

SEQ ID NO: 60877 - DNA, 34 bp, Homo sapiens; identical to SEQ ID NO: 24909
  source 1..34: mol_type = genomic DNA

SEQ ID NO: 60878 - DNA, 34 bp, Homo sapiens; identical to SEQ ID NO: 11817
  source 1..34: mol_type = genomic DNA

SEQ ID NO: 60879 - DNA, 47 bp, Homo sapiens; identical to SEQ ID NO: 17455
  source 1..47: mol_type = genomic DNA

SEQ ID NO: 60880 - DNA, 35 bp, Homo sapiens; identical to SEQ ID NO: 29114
  source 1..35: mol_type = genomic DNA

SEQ ID NO: 60881 - DNA, 46 bp, Homo sapiens; identical to SEQ ID NO: 22941
  source 1..46: mol_type = genomic DNA

SEQ ID NO: 60882 - DNA, 33 bp, Homo sapiens; identical to SEQ ID NO: 28751
  source 1..33: mol_type = genomic DNA

SEQ ID NO: 60883 - DNA, 34 bp, Homo sapiens; identical to SEQ ID NO: 20149
  source 1..34: mol_type = genomic DNA

SEQ ID NO: 60884 - DNA, 23 bp, Homo sapiens
  source 1..23: mol_type = genomic DNA
gggcccataccccgaaaatgttg

SEQ ID NO: 60885 - DNA, 38 bp, Homo sapiens; identical to SEQ ID NO: 23697
  source 1..38: mol_type = genomic DNA

SEQ ID NO: 60886 - DNA, 34 bp, Homo sapiens; identical to SEQ ID NO: 13539
  source 1..34: mol_type = genomic DNA

SEQ ID NO: 60887 - DNA, 39 bp, Homo sapiens; identical to SEQ ID NO: 12767
  source 1..39: mol_type = genomic DNA

SEQ ID NO: 60888 - DNA, 37 bp, Homo sapiens; identical to SEQ ID NO: 20396
  source 1..37: mol_type = genomic DNA

SEQ ID NO: 60889 - DNA, 28 bp, Homo sapiens
  source 1..28: mol_type = genomic DNA
tgtgggttcgagtcccatctggggtgcc

SEQ ID NO: 60890 - DNA, 32 bp, Homo sapiens; identical to SEQ ID NO: 23654
  source 1..32: mol_type = genomic DNA

SEQ ID NO: 60891 - DNA, 33 bp, Homo sapiens; identical to SEQ ID NO: 4645
  source 1..33: mol_type = genomic DNA

SEQ ID NO: 60892 - DNA, 34 bp, Homo sapiens; identical to SEQ ID NO: 1007
  source 1..34: mol_type = genomic DNA

SEQ ID NO: 60893 - DNA, 40 bp, Homo sapiens; identical to SEQ ID NO: 10736
  source 1..40: mol_type = genomic DNA

SEQ ID NO: 60894 - DNA, 44 bp, Homo sapiens; identical to SEQ ID NO: 27571
  source 1..44: mol_type = genomic DNA

SEQ ID NO: 60895 - DNA, 22 bp, Homo sapiens
  source 1..22: mol_type = genomic DNA
ttcgaatccggctcggaggacc

SEQ ID NO: 60896 - DNA, 18 bp, Homo sapiens
  source 1..18: mol_type = genomic DNA
aaccgggcagaaacacca

SEQ ID NO: 60897 - DNA, 39 bp, Homo sapiens; identical to SEQ ID NO: 11188
  source 1..39: mol_type = genomic DNA

SEQ ID NO: 60898 - DNA, 35 bp, Homo sapiens; identical to SEQ ID NO: 24801
  source 1..35: mol_type = genomic DNA

SEQ ID NO: 60899 - DNA, 17 bp, Homo sapiens
  source 1..17: mol_type = genomic DNA
tcttaatctcagggtcg

SEQ ID NO: 60900 - DNA, 42 bp, Homo sapiens; identical to SEQ ID NO: 30984
  source 1..42: mol_type = genomic DNA

SEQ ID NO: 60901 - DNA, 31 bp, Homo sapiens; identical to SEQ ID NO: 13062
  source 1..31: mol_type = genomic DNA

SEQ ID NO: 60902 - DNA, 18 bp, Homo sapiens
  source 1..18: mol_type = genomic DNA
aattccccgacggggagc

SEQ ID NO: 60903 - DNA, 32 bp, Homo sapiens; identical to SEQ ID NO: 26876
  source 1..32: mol_type = genomic DNA

SEQ ID NO: 60904 - DNA, 17 bp, Homo sapiens
  source 1..17: mol_type = genomic DNA
aaccgggcagaaacacc

SEQ ID NO: 60905 - DNA, 30 bp, Homo sapiens; identical to SEQ ID NO: 23456
  source 1..30: mol_type = genomic DNA

SEQ ID NO: 60906 - DNA, 17 bp, Homo sapiens
  source 1..17: mol_type = genomic DNA
aactgggcggaaacacc

SEQ ID NO: 60907 - DNA, 32 bp, Homo sapiens; identical to SEQ ID NO: 11998
  source 1..32: mol_type = genomic DNA

SEQ ID NO: 60908 - DNA, 37 bp, Homo sapiens; identical to SEQ ID NO: 12198
  source 1..37: mol_type = genomic DNA

SEQ ID NO: 60909 - DNA, 40 bp, Homo sapiens; identical to SEQ ID NO: 25685
  source 1..40: mol_type = genomic DNA

SEQ ID NO: 60910 - DNA, 33 bp, Homo sapiens; identical to SEQ ID NO: 23457
  source 1..33: mol_type = genomic DNA

SEQ ID NO: 60911 - DNA, 38 bp, Homo sapiens; identical to SEQ ID NO: 30352
  source 1..38: mol_type = genomic DNA

SEQ ID NO: 60912 - DNA, 45 bp, Homo sapiens; identical to SEQ ID NO: 25385
  source 1..45: mol_type = genomic DNA

SEQ ID NO: 60913 - DNA, 26 bp, Homo sapiens
  source 1..26: mol_type = genomic DNA
ccgggttcgattcccgggcggcgcac

SEQ ID NO: 60914 - DNA, 33 bp, Homo sapiens; identical to SEQ ID NO: 18813
  source 1..33: mol_type = genomic DNA

SEQ ID NO: 60915 - DNA, 34 bp, Homo sapiens; identical to SEQ ID NO: 21799
  source 1..34: mol_type = genomic DNA

SEQ ID NO: 60916 - DNA, 41 bp, Homo sapiens; identical to SEQ ID NO: 2384
  source 1..41: mol_type = genomic DNA

SEQ ID NO: 60917 - DNA, 31 bp, Homo sapiens; identical to SEQ ID NO: 13254
  source 1..31: mol_type = genomic DNA

SEQ ID NO: 60918 - DNA, 38 bp, Homo sapiens; identical to SEQ ID NO: 20914
  source 1..38: mol_type = genomic DNA

SEQ ID NO: 60919 - DNA, 37 bp, Homo sapiens; identical to SEQ ID NO: 26409
  source 1..37: mol_type = genomic DNA

SEQ ID NO: 60920 - DNA, 37 bp, Homo sapiens; identical to SEQ ID NO: 26829
  source 1..37: mol_type = genomic DNA

SEQ ID NO: 60921 - DNA, 31 bp, Homo sapiens; identical to SEQ ID NO: 17568
  source 1..31: mol_type = genomic DNA

SEQ ID NO: 60922 - DNA, 43 bp, Homo sapiens; identical to SEQ ID NO: 1550
  source 1..43: mol_type = genomic DNA

SEQ ID NO: 60923 - DNA, 32 bp, Homo sapiens; identical to SEQ ID NO: 25184
  source 1..32: mol_type = genomic DNA

SEQ ID NO: 60924 - DNA, 37 bp, Homo sapiens; identical to SEQ ID NO: 16932
  source 1..37: mol_type = genomic DNA

SEQ ID NO: 60925 - DNA, 18 bp, Homo sapiens
  source 1..18: mol_type = genomic DNA
cagggatgggttcgattc

SEQ ID NO: 60926 - DNA, 16 bp, Homo sapiens
  source 1..16: mol_type = genomic DNA
tcttaatcccagggtc

SEQ ID NO: 60927 - DNA, 40 bp, Homo sapiens; identical to SEQ ID NO: 20621
  source 1..40: mol_type = genomic DNA

SEQ ID NO: 60928 - DNA, 25 bp, Homo sapiens
  source 1..25: mol_type = genomic DNA
cggtagagcatgagactcttaatct

SEQ ID NO: 60929 - DNA, 24 bp, Homo sapiens
  source 1..24: mol_type = genomic DNA
agaagattccaggttcgactcctg

SEQ ID NO: 60930 - DNA, 30 bp, Homo sapiens; identical to SEQ ID NO: 23689
  source 1..30: mol_type = genomic DNA

SEQ ID NO: 60931 - DNA, 32 bp, Homo sapiens; identical to SEQ ID NO: 17569
  source 1..32: mol_type = genomic DNA

SEQ ID NO: 60932 - DNA, 28 bp, Homo sapiens
  source 1..28: mol_type = genomic DNA
agaaatatgtctgataaaagagttactt

SEQ ID NO: 60933 - DNA, 37 bp, Homo sapiens; identical to SEQ ID NO: 20411
  source 1..37: mol_type = genomic DNA

SEQ ID NO: 60934 - DNA, 29 bp, Homo sapiens
  source 1..29: mol_type = genomic DNA
gtcggtagagcatgagactcttaatctca

SEQ ID NO: 60935 - DNA, 36 bp, Homo sapiens; identical to SEQ ID NO: 4716
  source 1..36: mol_type = genomic DNA

SEQ ID NO: 60936 - DNA, 41 bp, Homo sapiens; identical to SEQ ID NO: 20894
  source 1..41: mol_type = genomic DNA

SEQ ID NO: 60937 - DNA, 32 bp, Homo sapiens; identical to SEQ ID NO: 17369
  source 1..32: mol_type = genomic DNA

SEQ ID NO: 60938 - DNA, 47 bp, Homo sapiens; identical to SEQ ID NO: 977
  source 1..47: mol_type = genomic DNA

SEQ ID NO: 60939 - DNA, 34 bp, Homo sapiens; identical to SEQ ID NO: 23712
  source 1..34: mol_type = genomic DNA

SEQ ID NO: 60940 - DNA, 34 bp, Homo sapiens; identical to SEQ ID NO: 20393
  source 1..34: mol_type = genomic DNA

SEQ ID NO: 60941 - DNA, 32 bp, Homo sapiens; identical to SEQ ID NO: 3921
  source 1..32: mol_type = genomic DNA

SEQ ID NO: 60942 - DNA, 35 bp, Homo sapiens; identical to SEQ ID NO: 19221
  source 1..35: mol_type = genomic DNA

SEQ ID NO: 60943 - DNA, 32 bp, Homo sapiens; identical to SEQ ID NO: 23691
  source 1..32: mol_type = genomic DNA

SEQ ID NO: 60944 - DNA, 38 bp, Homo sapiens; identical to SEQ ID NO: 19223
  source 1..38: mol_type = genomic DNA

SEQ ID NO: 60945 - DNA, 32 bp, Homo sapiens; identical to SEQ ID NO: 23710
  source 1..32: mol_type = genomic DNA

SEQ ID NO: 60946 - DNA, 29 bp, Homo sapiens
  source 1..29: mol_type = genomic DNA
gtcggtagagcatgggactcttaatccca

SEQ ID NO: 60947 - DNA, 35 bp, Homo sapiens; identical to SEQ ID NO: 3924
  source 1..35: mol_type = genomic DNA

SEQ ID NO: 60948 - DNA, 33 bp, Homo sapiens; identical to SEQ ID NO: 23692
  source 1..33: mol_type = genomic DNA

SEQ ID NO: 60949 - DNA, 33 bp, Homo sapiens; identical to SEQ ID NO: 28539
  source 1..33: mol_type = genomic DNA

SEQ ID NO: 60950 - DNA, 33 bp, Homo sapiens; identical to SEQ ID NO: 21754
  source 1..33: mol_type = genomic DNA

SEQ ID NO: 60951 - DNA, 39 bp, Homo sapiens; identical to SEQ ID NO: 10071
  source 1..39: mol_type = genomic DNA

SEQ ID NO: 60952 - DNA, 16 bp, Homo sapiens
  source 1..16: mol_type = genomic DNA
ccggggttcgattccc

SEQ ID NO: 60953 - DNA, 35 bp, Homo sapiens; identical to SEQ ID NO: 2144
  source 1..35: mol_type = genomic DNA

SEQ ID NO: 60954 - DNA, 34 bp, Homo sapiens; identical to SEQ ID NO: 12822
  source 1..34: mol_type = genomic DNA

SEQ ID NO: 60955 - DNA, 33 bp, Homo sapiens; identical to SEQ ID NO: 6795
  source 1..33: mol_type = genomic DNA

SEQ ID NO: 60956 - DNA, 41 bp, Homo sapiens; identical to SEQ ID NO: 29687
  source 1..41: mol_type = genomic DNA

SEQ ID NO: 60957 - DNA, 42 bp, Homo sapiens; identical to SEQ ID NO: 1182
  source 1..42: mol_type = genomic DNA

SEQ ID NO: 60958 - DNA, 35 bp, Homo sapiens; identical to SEQ ID NO: 27074
  source 1..35: mol_type = genomic DNA

SEQ ID NO: 60959 - DNA, 29 bp, Homo sapiens
  source 1..29: mol_type = genomic DNA
aggtggcccgggttcgactcccggtatgg

SEQ ID NO: 60960 - DNA, 27 bp, Homo sapiens
  source 1..27: mol_type = genomic DNA
atcagaagattctaggttcgactcctg

SEQ ID NO: 60961 - DNA, 18 bp, Homo sapiens
  source 1..18: mol_type = genomic DNA
tagggtgcttagctgtta

SEQ ID NO: 60962 - DNA, 28 bp, Homo sapiens
  source 1..28: mol_type = genomic DNA
ttggcctcctaagccagggattgtgggt

SEQ ID NO: 60963 - DNA, 33 bp, Homo sapiens; identical to SEQ ID NO: 18716
  source 1..33: mol_type = genomic DNA

SEQ ID NO: 60964 - DNA, 23 bp, Homo sapiens
  source 1..23: mol_type = genomic DNA
tagagcatgggactcttaatctc

SEQ ID NO: 60965 - DNA, 34 bp, Homo sapiens; identical to SEQ ID NO: 8553
  source 1..34: mol_type = genomic DNA

SEQ ID NO: 60966 - DNA, 27 bp, Homo sapiens
  source 1..27: mol_type = genomic DNA
gtccgcgtgggttcgaaccccactcct

SEQ ID NO: 60967 - DNA, 25 bp, Homo sapiens
  source 1..25: mol_type = genomic DNA
agtcggtagagcatgagacccttaa

SEQ ID NO: 60968 - DNA, 48 bp, Homo sapiens; identical to SEQ ID NO: 13308
  source 1..48: mol_type = genomic DNA

SEQ ID NO: 60969 - DNA, 32 bp, Homo sapiens; identical to SEQ ID NO: 21510
  source 1..32: mol_type = genomic DNA

SEQ ID NO: 60970 - DNA, 23 bp, Homo sapiens
  source 1..23: mol_type = genomic DNA
gttcaagtccctgtccaggcgcc

SEQ ID NO: 60971 - DNA, 39 bp, Homo sapiens; identical to SEQ ID NO: 27324
  source 1..39: mol_type = genomic DNA

SEQ ID NO: 60972 - DNA, 46 bp, Homo sapiens; identical to SEQ ID NO: 17688
  source 1..46: mol_type = genomic DNA

SEQ ID NO: 60973 - DNA, 33 bp, Homo sapiens; identical to SEQ ID NO: 5037
  source 1..33: mol_type = genomic DNA

SEQ ID NO: 60974 - DNA, 23 bp, Homo sapiens
  source 1..23: mol_type = genomic DNA
tgtccgcgtgggttcgaacccca

SEQ ID NO: 60975 - DNA, 25 bp, Homo sapiens
  source 1..25: mol_type = genomic DNA
cgggttcaaatcccggacgagcccc

SEQ ID NO: 60976 - DNA, 29 bp, Homo sapiens
  source 1..29: mol_type = genomic DNA
ctgagggtccagggttcatgtccctgttc

SEQ ID NO: 60977 - DNA, 27 bp, Homo sapiens
  source 1..27: mol_type = genomic DNA
gcaggttcgaatcctgccgactacgcc

SEQ ID NO: 60978 - DNA, 30 bp, Homo sapiens; identical to SEQ ID NO: 7495
  source 1..30: mol_type = genomic DNA

SEQ ID NO: 60979 - DNA, 19 bp, Homo sapiens
  source 1..19: mol_type = genomic DNA
tatagtggttagcatagct

SEQ ID NO: 60980 - DNA, 25 bp, Homo sapiens
  source 1..25: mol_type = genomic DNA
tgaggccccgggttcaatccccggc

SEQ ID NO: 60981 - DNA, 34 bp, Homo sapiens; identical to SEQ ID NO: 19477
  source 1..34: mol_type = genomic DNA

SEQ ID NO: 60982 - DNA, 25 bp, Homo sapiens
  source 1..25: mol_type = genomic DNA
attagggtgcttagctgttaactaa

SEQ ID NO: 60983 - DNA, 31 bp, Homo sapiens; identical to SEQ ID NO: 15973
  source 1..31: mol_type = genomic DNA

SEQ ID NO: 60984 - DNA, 33 bp, Homo sapiens; identical to SEQ ID NO: 6857
  source 1..33: mol_type = genomic DNA

SEQ ID NO: 60985 - DNA, 19 bp, Homo sapiens
  source 1..19: mol_type = genomic DNA
cgggttcgactcccggtgt

SEQ ID NO: 60986 - DNA, 32 bp, Homo sapiens; identical to SEQ ID NO: 11544
  source 1..32: mol_type = genomic DNA

SEQ ID NO: 60987 - DNA, 36 bp, Homo sapiens; identical to SEQ ID NO: 20889
  source 1..36: mol_type = genomic DNA

SEQ ID NO: 60988 - DNA, 31 bp, Homo sapiens; identical to SEQ ID NO: 7813
  source 1..31: mol_type = genomic DNA

SEQ ID NO: 60989 - DNA, 18 bp, Homo sapiens
  source 1..18: mol_type = genomic DNA
ttcgattctcatagtcct

SEQ ID NO: 60990 - DNA, 32 bp, Homo sapiens; identical to SEQ ID NO: 20593
  source 1..32: mol_type = genomic DNA

SEQ ID NO: 60991 - DNA, 33 bp, Homo sapiens; identical to SEQ ID NO: 9777
  source 1..33: mol_type = genomic DNA

SEQ ID NO: 60992 - DNA, 31 bp, Homo sapiens; identical to SEQ ID NO: 12247
  source 1..31: mol_type = genomic DNA

SEQ ID NO: 60993 - DNA, 46 bp, Homo sapiens; identical to SEQ ID NO: 6246
  source 1..46: mol_type = genomic DNA

SEQ ID NO: 60994 - DNA, 45 bp, Homo sapiens; identical to SEQ ID NO: 15432
  source 1..45: mol_type = genomic DNA

SEQ ID NO: 60995 - DNA, 33 bp, Homo sapiens; identical to SEQ ID NO: 12441
  source 1..33: mol_type = genomic DNA

SEQ ID NO: 60996 - DNA, 33 bp, Homo sapiens; identical to SEQ ID NO: 17570
  source 1..33: mol_type = genomic DNA

SEQ ID NO: 60997 - DNA, 30 bp, Homo sapiens; identical to SEQ ID NO: 4326
  source 1..30: mol_type = genomic DNA

SEQ ID NO: 60998 - DNA, 33 bp, Homo sapiens; identical to SEQ ID NO: 15757
  source 1..33: mol_type = genomic DNA

SEQ ID NO: 60999 - DNA, 46 bp, Homo sapiens; identical to SEQ ID NO: 20373
  source 1..46: mol_type = genomic DNA

SEQ ID NO: 61000 - DNA, 46 bp, Homo sapiens; identical to SEQ ID NO: 5812
  source 1..46: mol_type = genomic DNA

SEQ ID NO: 61001 - DNA, 24 bp, Homo sapiens
  source 1..24: mol_type = genomic DNA
attctcgcctgccacgcgggaggc

SEQ ID NO: 61002 - DNA, 43 bp, Homo sapiens; identical to SEQ ID NO: 21804
  source 1..43: mol_type = genomic DNA

SEQ ID NO: 61003 - DNA, 19 bp, Homo sapiens
  source 1..19: mol_type = genomic DNA
gtggtagagcgcgtgcttc

SEQ ID NO: 61004 - DNA, 40 bp, Homo sapiens; identical to SEQ ID NO: 28462
  source 1..40: mol_type = genomic DNA

SEQ ID NO: 61005 - DNA, 29 bp, Homo sapiens
  source 1..29: mol_type = genomic DNA
ttgcgttcagttgatgcagagtggggttt

SEQ ID NO: 61006 - DNA, 37 bp, Homo sapiens; identical to SEQ ID NO: 25312
  source 1..37: mol_type = genomic DNA

SEQ ID NO: 61007 - DNA, 28 bp, Homo sapiens
  source 1..28: mol_type = genomic DNA
ttcccattcttgcgacccgggttcgatt

SEQ ID NO: 61008 - DNA, 27 bp, Homo sapiens
  source 1..27: mol_type = genomic DNA
cagaagattccaggttcgactcctggc

SEQ ID NO: 61009 - DNA, 40 bp, Homo sapiens; identical to SEQ ID NO: 26823
  source 1..40: mol_type = genomic DNA

SEQ ID NO: 61010 - DNA, 34 bp, Homo sapiens; identical to SEQ ID NO: 7818
  source 1..34: mol_type = genomic DNA

SEQ ID NO: 61011 - DNA, 22 bp, Homo sapiens
  source 1..22: mol_type = genomic DNA
agagcatgagactcttaatctc

SEQ ID NO: 61012 - DNA, 34 bp, Homo sapiens; identical to SEQ ID NO: 21850
  source 1..34: mol_type = genomic DNA

SEQ ID NO: 61013 - DNA, 38 bp, Homo sapiens; identical to SEQ ID NO: 2954
  source 1..38: mol_type = genomic DNA

SEQ ID NO: 61014 - DNA, 31 bp, Homo sapiens; identical to SEQ ID NO: 8322
  source 1..31: mol_type = genomic DNA

SEQ ID NO: 61015 - DNA, 19 bp, Homo sapiens
  source 1..19: mol_type = genomic DNA
cgcattggtggttcagtgg

SEQ ID NO: 61016 - DNA, 28 bp, Homo sapiens
  source 1..28: mol_type = genomic DNA
attgtgggttcgagtcccacctggggtg

SEQ ID NO: 61017 - DNA, 34 bp, Homo sapiens; identical to SEQ ID NO: 28918
  source 1..34: mol_type = genomic DNA

SEQ ID NO: 61018 - DNA, 31 bp, Homo sapiens; identical to SEQ ID NO: 9329
  source 1..31: mol_type = genomic DNA

SEQ ID NO: 61019 - DNA, 32 bp, Homo sapiens; identical to SEQ ID NO: 18812
  source 1..32: mol_type = genomic DNA

SEQ ID NO: 61020 - DNA, 17 bp, Homo sapiens
  source 1..17: mol_type = genomic DNA
gccccgggttcgatccc

SEQ ID NO: 61021 - DNA, 37 bp, Homo sapiens; identical to SEQ ID NO: 20913
  source 1..37: mol_type = genomic DNA

SEQ ID NO: 61022 - DNA, 48 bp, Homo sapiens; identical to SEQ ID NO: 10037
  source 1..48: mol_type = genomic DNA

SEQ ID NO: 61023 - DNA, 41 bp, Homo sapiens; identical to SEQ ID NO: 12602
  source 1..41: mol_type = genomic DNA

SEQ ID NO: 61024 - DNA, 16 bp, Homo sapiens
  source 1..16: mol_type = genomic DNA
tggttcgagcccaccc

SEQ ID NO: 61025 - DNA, 48 bp, Homo sapiens; identical to SEQ ID NO: 14547
  source 1..48: mol_type = genomic DNA

SEQ ID NO: 61026 - DNA, 22 bp, Homo sapiens
  source 1..22: mol_type = genomic DNA
catcagattgtgaatctgacaa

SEQ ID NO: 61027 - DNA, 33 bp, Homo sapiens; identical to SEQ ID NO: 12821
  source 1..33: mol_type = genomic DNA

SEQ ID NO: 61028 - DNA, 29 bp, Homo sapiens
  source 1..29: mol_type = genomic DNA
actctgcgttgtggccgcagcaacctcgg

SEQ ID NO: 61029 - DNA, 16 bp, Homo sapiens
  source 1..16: mol_type = genomic DNA
tgataaaagagttact

SEQ ID NO: 61030 - DNA, 32 bp, Homo sapiens; identical to SEQ ID NO: 15308
  source 1..32: mol_type = genomic DNA

SEQ ID NO: 61031 - DNA, 18 bp, Homo sapiens
  source 1..18: mol_type = genomic DNA
tggggggttcgattcctt

SEQ ID NO: 61032 - DNA, 23 bp, Homo sapiens
  source 1..23: mol_type = genomic DNA
cattaaattatgataatcatatt

SEQ ID NO: 61033 - DNA, 31 bp, Homo sapiens; identical to SEQ ID NO: 19379
  source 1..31: mol_type = genomic DNA

SEQ ID NO: 61034 - DNA, 31 bp, Homo sapiens; identical to SEQ ID NO: 30966
  source 1..31: mol_type = genomic DNA

SEQ ID NO: 61035 - DNA, 42 bp, Homo sapiens; identical to SEQ ID NO: 4555
  source 1..42: mol_type = genomic DNA

SEQ ID NO: 61036 - DNA, 20 bp, Homo sapiens
  source 1..20: mol_type = genomic DNA
aatgatttcgactcattaaa

SEQ ID NO: 61037 - DNA, 27 bp, Homo sapiens
  source 1..27: mol_type = genomic DNA
cgtgttcaagtcacgtcggggtcacca

SEQ ID NO: 61038 - DNA, 39 bp, Homo sapiens; identical to SEQ ID NO: 10310
  source 1..39: mol_type = genomic DNA

SEQ ID NO: 61039 - DNA, 48 bp, Homo sapiens; identical to SEQ ID NO: 23772
  source 1..48: mol_type = genomic DNA

SEQ ID NO: 61040 - DNA, 23 bp, Homo sapiens
  source 1..23: mol_type = genomic DNA
ataaaacttaaaactttacagtc

SEQ ID NO: 61041 - DNA, 24 bp, Homo sapiens
  source 1..24: mol_type = genomic DNA
gctttcaccgccgcggcccgggtt

SEQ ID NO: 61042 - DNA, 30 bp, Homo sapiens; identical to SEQ ID NO: 26623
  source 1..30: mol_type = genomic DNA

SEQ ID NO: 61043 - DNA, 32 bp, Homo sapiens; identical to SEQ ID NO: 11353
  source 1..32: mol_type = genomic DNA

SEQ ID NO: 61044 - DNA, 41 bp, Homo sapiens; identical to SEQ ID NO: 29302
  source 1..41: mol_type = genomic DNA

SEQ ID NO: 61045 - DNA, 33 bp, Homo sapiens; identical to SEQ ID NO: 4714
  source 1..33: mol_type = genomic DNA

SEQ ID NO: 61046 - DNA, 16 bp, Homo sapiens
  source 1..16: mol_type = genomic DNA
aaccgggcagaaacac

SEQ ID NO: 61047 - DNA, 29 bp, Homo sapiens
  source 1..29: mol_type = genomic DNA
gaagattctaggttcgactcctggctggc

SEQ ID NO: 61048 - DNA, 29 bp, Homo sapiens
  source 1..29: mol_type = genomic DNA
aatatagtttaaccaaaacatcagattgt

SEQ ID NO: 61049 - DNA, 17 bp, Homo sapiens
  source 1..17: mol_type = genomic DNA
acttaagatccaatgga

SEQ ID NO: 61050 - DNA, 20 bp, Homo sapiens
  source 1..20: mol_type = genomic DNA
agtggttagagcactggtct

SEQ ID NO: 61051 - DNA, 33 bp, Homo sapiens; identical to SEQ ID NO: 18251
  source 1..33: mol_type = genomic DNA

SEQ ID NO: 61052 - DNA, 29 bp, Homo sapiens
  source 1..29: mol_type = genomic DNA
tgtagtggtatcatgcaagattcccattc

SEQ ID NO: 61053 - DNA, 33 bp, Homo sapiens; identical to SEQ ID NO: 13075
  source 1..33: mol_type = genomic DNA

SEQ ID NO: 61054 - DNA, 35 bp, Homo sapiens; identical to SEQ ID NO: 10161
  source 1..35: mol_type = genomic DNA

SEQ ID NO: 61055 - DNA, 31 bp, Homo sapiens; identical to SEQ ID NO: 26321
  source 1..31: mol_type = genomic DNA

SEQ ID NO: 61056 - DNA, 26 bp, Homo sapiens
  source 1..26: mol_type = genomic DNA
atgtctgataaaagagttactttgat

SEQ ID NO: 61057 - DNA, 26 bp, Homo sapiens
  source 1..26: mol_type = genomic DNA
gtggcccgggttcgactcccggtatg

SEQ ID NO: 61058 - DNA, 48 bp, Homo sapiens; identical to SEQ ID NO: 17348
  source 1..48: mol_type = genomic DNA

SEQ ID NO: 61059 - DNA, 28 bp, Homo sapiens
  source 1..28: mol_type = genomic DNA
taatcgcataaaacttaaaactttacag

SEQ ID NO: 61060 - DNA, 29 bp, Homo sapiens
  source 1..29: mol_type = genomic DNA
aaggtcgcgggttcgaaccccgtacgggc

SEQ ID NO: 61061 - DNA, 36 bp, Homo sapiens; identical to SEQ ID NO: 23843
  source 1..36: mol_type = genomic DNA

SEQ ID NO: 61062 - DNA, 26 bp, Homo sapiens
  source 1..26: mol_type = genomic DNA
ttaaatacagaccaagagccttcaaa

SEQ ID NO: 61063 - DNA, 25 bp, Homo sapiens
  source 1..25: mol_type = genomic DNA
caatacactgaaaatgtttagacgg

SEQ ID NO: 61064 - DNA, 37 bp, Homo sapiens; identical to SEQ ID NO: 18415
  source 1..37: mol_type = genomic DNA

SEQ ID NO: 61065 - DNA, 27 bp, Homo sapiens
  source 1..27: mol_type = genomic DNA
cttgtaaaccaggggtcgcgagttcaa

SEQ ID NO: 61066 - DNA, 40 bp, Homo sapiens; identical to SEQ ID NO: 14973
  source 1..40: mol_type = genomic DNA

SEQ ID NO: 61067 - DNA, 48 bp, Homo sapiens; identical to SEQ ID NO: 30047
  source 1..48: mol_type = genomic DNA

SEQ ID NO: 61068 - DNA, 29 bp, Homo sapiens
  source 1..29: mol_type = genomic DNA
tagagcatgagactcttaatctcagggtc

SEQ ID NO: 61069 - DNA, 34 bp, Homo sapiens; identical to SEQ ID NO: 26407
  source 1..34: mol_type = genomic DNA

SEQ ID NO: 61070 - DNA, 18 bp, Homo sapiens
  source 1..18: mol_type = genomic DNA
aatggtagaattctcgcc

SEQ ID NO: 61071 - DNA, 26 bp, Homo sapiens
  source 1..26: mol_type = genomic DNA
caatggacatatgtccgcgtgggttc

SEQ ID NO: 61072 - DNA, 48 bp, Homo sapiens; identical to SEQ ID NO: 998
  source 1..48: mol_type = genomic DNA

SEQ ID NO: 61073 - DNA, 35 bp, Homo sapiens; identical to SEQ ID NO: 14359
  source 1..35: mol_type = genomic DNA

SEQ ID NO: 61074 - DNA, 19 bp, Homo sapiens
  source 1..19: mol_type = genomic DNA
acttccaattaactagttt

SEQ ID NO: 61075 - DNA, 41 bp, Homo sapiens; identical to SEQ ID NO: 7573
  source 1..41: mol_type = genomic DNA

SEQ ID NO: 61076 - DNA, 29 bp, Homo sapiens
  source 1..29: mol_type = genomic DNA
cagggtcgtgggttcgagccccacgttgg

SEQ ID NO: 61077 - DNA, 38 bp, Homo sapiens; identical to SEQ ID NO: 20816
  source 1..38: mol_type = genomic DNA

SEQ ID NO: 61078 - DNA, 32 bp, Homo sapiens; identical to SEQ ID NO: 5895
  source 1..32: mol_type = genomic DNA

SEQ ID NO: 61079 - DNA, 47 bp, Homo sapiens; identical to SEQ ID NO: 816
  source 1..47: mol_type = genomic DNA

SEQ ID NO: 61080 - DNA, 40 bp, Homo sapiens; identical to SEQ ID NO: 19243
  source 1..40: mol_type = genomic DNA

SEQ ID NO: 61081 - DNA, 29 bp, Homo sapiens
  source 1..29: mol_type = genomic DNA
tgggtgctaatggtggagttaaagacttt

SEQ ID NO: 61082 - DNA, 34 bp, Homo sapiens; identical to SEQ ID NO: 23508
  source 1..34: mol_type = genomic DNA

SEQ ID NO: 61083 - DNA, 17 bp, Homo sapiens
  source 1..17: mol_type = genomic DNA
ggggtagagcatttgac

SEQ ID NO: 61084 - DNA, 33 bp, Homo sapiens; identical to SEQ ID NO: 18001
  source 1..33: mol_type = genomic DNA

SEQ ID NO: 61085 - DNA, 29 bp, Homo sapiens
  source 1..29: mol_type = genomic DNA
gcttagcttaattaaagtggctgatttgc

SEQ ID NO: 61086 - DNA, 46 bp, Homo sapiens; identical to SEQ ID NO: 17589
  source 1..46: mol_type = genomic DNA

SEQ ID NO: 61087 - DNA, 39 bp, Homo sapiens; identical to SEQ ID NO: 7369
  source 1..39: mol_type = genomic DNA

SEQ ID NO: 61088 - DNA, 17 bp, Homo sapiens
  source 1..17: mol_type = genomic DNA
ggattcggcgctttcac

SEQ ID NO: 61089 - DNA, 17 bp, Homo sapiens
  source 1..17: mol_type = genomic DNA
tggttaggattcagcgc

SEQ ID NO: 61090 - DNA, 31 bp, Homo sapiens; identical to SEQ ID NO: 14658
  source 1..31: mol_type = genomic DNA

SEQ ID NO: 61091 - DNA, 22 bp, Homo sapiens
  source 1..22: mol_type = genomic DNA
atgaggccccgggttcaatccc

SEQ ID NO: 61092 - DNA, 19 bp, Homo sapiens
  source 1..19: mol_type = genomic DNA
caacgatggtttttcatat

SEQ ID NO: 61093 - DNA, 35 bp, Homo sapiens; identical to SEQ ID NO: 3189
  source 1..35: mol_type = genomic DNA

SEQ ID NO: 61094 - DNA, 22 bp, Homo sapiens
  source 1..22: mol_type = genomic DNA
ttaaaggataacagctatccat

SEQ ID NO: 61095 - DNA, 24 bp, Homo sapiens
  source 1..24: mol_type = genomic DNA
caaaacgaatgatttcgactcatt

SEQ ID NO: 61096 - DNA, 29 bp, Homo sapiens
  source 1..29: mol_type = genomic DNA
ggtcgtgagttcgatcctcacacggggca

SEQ ID NO: 61097 - DNA, 32 bp, Homo sapiens; identical to SEQ ID NO: 14659
  source 1..32: mol_type = genomic DNA

SEQ ID NO: 61098 - DNA, 17 bp, Homo sapiens
  source 1..17: mol_type = genomic DNA
taaacccccttatttct

SEQ ID NO: 61099 - DNA, 48 bp, Homo sapiens; identical to SEQ ID NO: 28350
  source 1..48: mol_type = genomic DNA

SEQ ID NO: 61100 - DNA, 30 bp, Homo sapiens; identical to SEQ ID NO: 9408
  source 1..30: mol_type = genomic DNA

SEQ ID NO: 61101 - DNA, 25 bp, Homo sapiens
  source 1..25: mol_type = genomic DNA
ttagctgttaactaagtgtttgtgg

SEQ ID NO: 61102 - DNA, 18 bp, Homo sapiens
  source 1..18: mol_type = genomic DNA
gatagctcagttggtaga

SEQ ID NO: 61103 - DNA, 48 bp, Homo sapiens; identical to SEQ ID NO: 7916
  source 1..48: mol_type = genomic DNA

SEQ ID NO: 61104 - DNA, 39 bp, Homo sapiens; identical to SEQ ID NO: 29037
  source 1..39: mol_type = genomic DNA

SEQ ID NO: 61105 - DNA, 27 bp, Homo sapiens
  source 1..27: mol_type = genomic DNA
ggagaaagctcacaagaactgctaact

SEQ ID NO: 61106 - DNA, 22 bp, Homo sapiens
  source 1..22: mol_type = genomic DNA
agaattttggattctcagggat

SEQ ID NO: 61107 - DNA, 23 bp, Homo sapiens
  source 1..23: mol_type = genomic DNA
tcagttgatgcagagtggggttt

SEQ ID NO: 61108 - DNA, 23 bp, Homo sapiens
  source 1..23: mol_type = genomic DNA
attcccattcttgcgacccgggt

SEQ ID NO: 61109 - DNA, 42 bp, Homo sapiens; identical to SEQ ID NO: 24420
  source 1..42: mol_type = genomic DNA

SEQ ID NO: 61110 - DNA, 33 bp, Homo sapiens; identical to SEQ ID NO: 21975
  source 1..33: mol_type = genomic DNA

SEQ ID NO: 61111 - DNA, 42 bp, Homo sapiens; identical to SEQ ID NO: 14564
  source 1..42: mol_type = genomic DNA

SEQ ID NO: 61112 - DNA, 45 bp, Homo sapiens; identical to SEQ ID NO: 15466
  source 1..45: mol_type = genomic DNA

SEQ ID NO: 61113 - DNA, 26 bp, Homo sapiens
  source 1..26: mol_type = genomic DNA
ttaggattcctggttttcacccaggc

SEQ ID NO: 61114 - DNA, 19 bp, Homo sapiens
  source 1..19: mol_type = genomic DNA
gagcatgagactcttaatc

SEQ ID NO: 61115 - DNA, 28 bp, Homo sapiens
  source 1..28: mol_type = genomic DNA
gctccatagctcaggggttagagcactg

SEQ ID NO: 61116 - DNA, 28 bp, Homo sapiens
  source 1..28: mol_type = genomic DNA
gattgtgggttcgagtcccatctgggtc

SEQ ID NO: 61117 - DNA, 48 bp, Homo sapiens; identical to SEQ ID NO: 18318
  source 1..48: mol_type = genomic DNA

SEQ ID NO: 61118 - DNA, 42 bp, Homo sapiens; identical to SEQ ID NO: 19501
  source 1..42: mol_type = genomic DNA

SEQ ID NO: 61119 - DNA, 21 bp, Homo sapiens
  source 1..21: mol_type = genomic DNA
ttgtgggtttaagtcccattg

SEQ ID NO: 61120 - DNA, 29 bp, Homo sapiens
  source 1..29: mol_type = genomic DNA
gatttcgactcattaaattatgataatca

SEQ ID NO: 61121 - DNA, 33 bp, Homo sapiens; identical to SEQ ID NO: 24058
  source 1..33: mol_type = genomic DNA

SEQ ID NO: 61122 - DNA, 28 bp, Homo sapiens
  source 1..28: mol_type = genomic DNA
ctcagggatgggttcgattctcatagtc

SEQ ID NO: 61123 - DNA, 36 bp, Homo sapiens; identical to SEQ ID NO: 15758
  source 1..36: mol_type = genomic DNA

SEQ ID NO: 61124 - DNA, 28 bp, Homo sapiens
  source 1..28: mol_type = genomic DNA
ggcagagcccggtaatcgcataaaactt

SEQ ID NO: 61125 - DNA, 48 bp, Homo sapiens; identical to SEQ ID NO: 24088
  source 1..48: mol_type = genomic DNA

SEQ ID NO: 61126 - DNA, 48 bp, Homo sapiens; identical to SEQ ID NO: 8654
  source 1..48: mol_type = genomic DNA

SEQ ID NO: 61127 - DNA, 36 bp, Homo sapiens; identical to SEQ ID NO: 20758
  source 1..36: mol_type = genomic DNA

SEQ ID NO: 61128 - DNA, 36 bp, Homo sapiens; identical to SEQ ID NO: 8433
  source 1..36: mol_type = genomic DNA

SEQ ID NO: 61129 - DNA, 41 bp, Homo sapiens; identical to SEQ ID NO: 16317
  source 1..41: mol_type = genomic DNA

SEQ ID NO: 61130 - DNA, 44 bp, Homo sapiens; identical to SEQ ID NO: 28009
  source 1..44: mol_type = genomic DNA

SEQ ID NO: 61131 - DNA, 26 bp, Homo sapiens
  source 1..26: mol_type = genomic DNA
cagcggaagcgtgctgggcccataac

SEQ ID NO: 61132 - DNA, 35 bp, Homo sapiens; identical to SEQ ID NO: 24827
  source 1..35: mol_type = genomic DNA

SEQ ID NO: 61133 - DNA, 29 bp, Homo sapiens
  source 1..29: mol_type = genomic DNA
tttatgtagcttacctcctcaaagcaata

SEQ ID NO: 61134 - DNA, 20 bp, Homo sapiens
  source 1..20: mol_type = genomic DNA
aggctaaatcctatatatct

SEQ ID NO: 61135 - DNA, 32 bp, Homo sapiens; identical to SEQ ID NO: 17588
  source 1..32: mol_type = genomic DNA

SEQ ID NO: 61136 - DNA, 16 bp, Homo sapiens
  source 1..16: mol_type = genomic DNA
ggttaggattcagcgc

SEQ ID NO: 61137 - DNA, 46 bp, Homo sapiens; identical to SEQ ID NO: 5099
  source 1..46: mol_type = genomic DNA

SEQ ID NO: 61138 - DNA, 40 bp, Homo sapiens; identical to SEQ ID NO: 19720
  source 1..40: mol_type = genomic DNA

SEQ ID NO: 61139 - DNA, 31 bp, Homo sapiens; identical to SEQ ID NO: 15607
  source 1..31: mol_type = genomic DNA

SEQ ID NO: 61140 - DNA, 32 bp, Homo sapiens; identical to SEQ ID NO: 1917
  source 1..32: mol_type = genomic DNA

SEQ ID NO: 61141 - DNA, 42 bp, Homo sapiens; identical to SEQ ID NO: 23716
  source 1..42: mol_type = genomic DNA

SEQ ID NO: 61142 - DNA, 29 bp, Homo sapiens
  source 1..29: mol_type = genomic DNA
agagcatgggactcttaatcccagggtcg

SEQ ID NO: 61143 - DNA, 27 bp, Homo sapiens
  source 1..27: mol_type = genomic DNA
gtcggtagagcatgagacccttaatct

SEQ ID NO: 61144 - DNA, 19 bp, Homo sapiens
  source 1..19: mol_type = genomic DNA
tcgtaaaccgaagatcgcg

SEQ ID NO: 61145 - DNA, 21 bp, Homo sapiens
  source 1..21: mol_type = genomic DNA
taggattcggcgctttcaccg

SEQ ID NO: 61146 - DNA, 31 bp, Homo sapiens; identical to SEQ ID NO: 10188
  source 1..31: mol_type = genomic DNA

SEQ ID NO: 61147 - DNA, 36 bp, Homo sapiens; identical to SEQ ID NO: 12902
  source 1..36: mol_type = genomic DNA

SEQ ID NO: 61148 - DNA, 17 bp, Homo sapiens
  source 1..17: mol_type = genomic DNA
gttcgatccccgtacgg

SEQ ID NO: 61149 - DNA, 32 bp, Homo sapiens; identical to SEQ ID NO: 10189
  source 1..32: mol_type = genomic DNA

SEQ ID NO: 61150 - DNA, 34 bp, Homo sapiens; identical to SEQ ID NO: 4416
  source 1..34: mol_type = genomic DNA

SEQ ID NO: 61151 - DNA, 38 bp, Homo sapiens; identical to SEQ ID NO: 23824
  source 1..38: mol_type = genomic DNA

SEQ ID NO: 61152 - DNA, 33 bp, Homo sapiens; identical to SEQ ID NO: 6748
  source 1..33: mol_type = genomic DNA

SEQ ID NO: 61153 - DNA, 24 bp, Homo sapiens
  source 1..24: mol_type = genomic DNA
tcagattgtgaatctgacaacaga

SEQ ID NO: 61154 - DNA, 36 bp, Homo sapiens; identical to SEQ ID NO: 18963
  source 1..36: mol_type = genomic DNA

SEQ ID NO: 61155 - DNA, 34 bp, Homo sapiens; identical to SEQ ID NO: 12901
  source 1..34: mol_type = genomic DNA

SEQ ID NO: 61156 - DNA, 26 bp, Homo sapiens
  source 1..26: mol_type = genomic DNA
aattgcaaattcgaagaagcagcttc

SEQ ID NO: 61157 - DNA, 40 bp, Homo sapiens; identical to SEQ ID NO: 27866
  source 1..40: mol_type = genomic DNA

SEQ ID NO: 61158 - DNA, 23 bp, Homo sapiens
  source 1..23: mol_type = genomic DNA
ggggtcgcgagttcaaatctcgc

SEQ ID NO: 61159 - DNA, 32 bp, Homo sapiens; identical to SEQ ID NO: 14366
  source 1..32: mol_type = genomic DNA

SEQ ID NO: 61160 - DNA, 32 bp, Homo sapiens; identical to SEQ ID NO: 31106
  source 1..32: mol_type = genomic DNA

SEQ ID NO: 61161 - DNA, 17 bp, Homo sapiens
  source 1..17: mol_type = genomic DNA
ttcgaaccccgtccgtg

SEQ ID NO: 61162 - DNA, 26 bp, Homo sapiens
  source 1..26: mol_type = genomic DNA
gctggggattgtgggttcgagtccca

SEQ ID NO: 61163 - DNA, 27 bp, Homo sapiens
  source 1..27: mol_type = genomic DNA
atagtttaaacaaaacgaatgatttcg

SEQ ID NO: 61164 - DNA, 35 bp, Homo sapiens; identical to SEQ ID NO: 4954
  source 1..35: mol_type = genomic DNA

SEQ ID NO: 61165 - DNA, 44 bp, Homo sapiens; identical to SEQ ID NO: 7407
  source 1..44: mol_type = genomic DNA

SEQ ID NO: 61166 - DNA, 20 bp, Homo sapiens
  source 1..20: mol_type = genomic DNA
aggttcgaaccctgctcgct

SEQ ID NO: 61167 - DNA, 48 bp, Homo sapiens; identical to SEQ ID NO: 59
  source 1..48: mol_type = genomic DNA

SEQ ID NO: 61168 - DNA, 35 bp, Homo sapiens; identical to SEQ ID NO: 16692
  source 1..35: mol_type = genomic DNA

SEQ ID NO: 61169 - DNA, 20 bp, Homo sapiens
  source 1..20: mol_type = genomic DNA
tgtagtggtcatcacgttcg

SEQ ID NO: 61170 - DNA, 27 bp, Homo sapiens
  source 1..27: mol_type = genomic DNA
ggggcgtgggttcgaatcccaccgctg

SEQ ID NO: 61171 - DNA, 42 bp, Homo sapiens; identical to SEQ ID NO: 13588
  source 1..42: mol_type = genomic DNA

SEQ ID NO: 61172 - DNA, 24 bp, Homo sapiens
  source 1..24: mol_type = genomic DNA
gtggttatcacgtctgctttacac

SEQ ID NO: 61173 - DNA, 36 bp, Homo sapiens; identical to SEQ ID NO: 9803
  source 1..36: mol_type = genomic DNA

SEQ ID NO: 61174 - DNA, 34 bp, Homo sapiens; identical to SEQ ID NO: 28007
  source 1..34: mol_type = genomic DNA

SEQ ID NO: 61175 - DNA, 31 bp, Homo sapiens; identical to SEQ ID NO: 12302
  source 1..31: mol_type = genomic DNA

SEQ ID NO: 61176 - DNA, 27 bp, Homo sapiens
  source 1..27: mol_type = genomic DNA
cagttgattagggtgcttagctgttaa

SEQ ID NO: 61177 - DNA, 35 bp, Homo sapiens; identical to SEQ ID NO: 25187
  source 1..35: mol_type = genomic DNA

SEQ ID NO: 61178 - DNA, 32 bp, Homo sapiens; identical to SEQ ID NO: 30054
  source 1..32: mol_type = genomic DNA

SEQ ID NO: 61179 - DNA, 31 bp, Homo sapiens; identical to SEQ ID NO: 23004
  source 1..31: mol_type = genomic DNA

SEQ ID NO: 61180 - DNA, 36 bp, Homo sapiens; identical to SEQ ID NO: 16663
  source 1..36: mol_type = genomic DNA

SEQ ID NO: 61181 - DNA, 34 bp, Homo sapiens; identical to SEQ ID NO: 3136
  source 1..34: mol_type = genomic DNA

SEQ ID NO: 61182 - DNA, 38 bp, Homo sapiens; identical to SEQ ID NO: 5208
  source 1..38: mol_type = genomic DNA

SEQ ID NO: 61183 - DNA, 16 bp, Homo sapiens
  source 1..16: mol_type = genomic DNA
gttcgagcctcacctg

SEQ ID NO: 61184 - DNA, 33 bp, Homo sapiens; identical to SEQ ID NO: 3271
  source 1..33: mol_type = genomic DNA

SEQ ID NO: 61185 - DNA, 48 bp, Homo sapiens; identical to SEQ ID NO: 12371
  source 1..48: mol_type = genomic DNA

SEQ ID NO: 61186 - DNA, 23 bp, Homo sapiens
  source 1..23: mol_type = genomic DNA
gtagagcatgagacccttaatct

SEQ ID NO: 61187 - DNA, 36 bp, Homo sapiens; identical to SEQ ID NO: 27245
  source 1..36: mol_type = genomic DNA

SEQ ID NO: 61188 - DNA, 37 bp, Homo sapiens; identical to SEQ ID NO: 15922
  source 1..37: mol_type = genomic DNA

SEQ ID NO: 61189 - DNA, 40 bp, Homo sapiens; identical to SEQ ID NO: 20818
  source 1..40: mol_type = genomic DNA

SEQ ID NO: 61190 - DNA, 48 bp, Homo sapiens; identical to SEQ ID NO: 23495
  source 1..48: mol_type = genomic DNA

SEQ ID NO: 61191 - DNA, 40 bp, Homo sapiens; identical to SEQ ID NO: 29596
  source 1..40: mol_type = genomic DNA

SEQ ID NO: 61192 - DNA, 29 bp, Homo sapiens
  source 1..29: mol_type = genomic DNA
actcattaaattatgataatcatatttac

SEQ ID NO: 61193 - DNA, 33 bp, Homo sapiens; identical to SEQ ID NO: 9859
  source 1..33: mol_type = genomic DNA

SEQ ID NO: 61194 - DNA, 31 bp, Homo sapiens; identical to SEQ ID NO: 24798
  source 1..31: mol_type = genomic DNA

SEQ ID NO: 61195 - DNA, 39 bp, Homo sapiens; identical to SEQ ID NO: 19200
  source 1..39: mol_type = genomic DNA

SEQ ID NO: 61196 - DNA, 39 bp, Homo sapiens; identical to SEQ ID NO: 25112
  source 1..39: mol_type = genomic DNA

SEQ ID NO: 61197 - DNA, 31 bp, Homo sapiens; identical to SEQ ID NO: 4260
  source 1..31: mol_type = genomic DNA

SEQ ID NO: 61198 - DNA, 21 bp, Homo sapiens
  source 1..21: mol_type = genomic DNA
tcagaagattccaggttcgac

SEQ ID NO: 61199 - DNA, 29 bp, Homo sapiens
  source 1..29: mol_type = genomic DNA
agcactctggactttgaatccagcgatcc

SEQ ID NO: 61200 - DNA, 29 bp, Homo sapiens
  source 1..29: mol_type = genomic DNA
ccgtagtggagtggttatcacgttcgcct

SEQ ID NO: 61201 - DNA, 31 bp, Homo sapiens; identical to SEQ ID NO: 26786
  source 1..31: mol_type = genomic DNA

SEQ ID NO: 61202 - DNA, 41 bp, Homo sapiens; identical to SEQ ID NO: 30046
  source 1..41: mol_type = genomic DNA

SEQ ID NO: 61203 - DNA, 18 bp, Homo sapiens
  source 1..18: mol_type = genomic DNA
ctcataatctgaaggtcg

SEQ ID NO: 61204 - DNA, 40 bp, Homo sapiens; identical to SEQ ID NO: 11417
  source 1..40: mol_type = genomic DNA

SEQ ID NO: 61205 - DNA, 18 bp, Homo sapiens
  source 1..18: mol_type = genomic DNA
agtggtaagcatagctgc

SEQ ID NO: 61206 - DNA, 20 bp, Homo sapiens
  source 1..20: mol_type = genomic DNA
aaaacttaaaactttacagt

SEQ ID NO: 61207 - DNA, 32 bp, Homo sapiens; identical to SEQ ID NO: 23051
  source 1..32: mol_type = genomic DNA

SEQ ID NO: 61208 - DNA, 25 bp, Homo sapiens
  source 1..25: mol_type = genomic DNA
accaaaacatcagattgtgaatctg

SEQ ID NO: 61209 - DNA, 35 bp, Homo sapiens; identical to SEQ ID NO: 6189
  source 1..35: mol_type = genomic DNA

SEQ ID NO: 61210 - DNA, 28 bp, Homo sapiens
  source 1..28: mol_type = genomic DNA
gaggtcccgggttcgatccccagcatct

SEQ ID NO: 61211 - DNA, 27 bp, Homo sapiens
  source 1..27: mol_type = genomic DNA
ctctcaccgccgcggcccgggttcgat

SEQ ID NO: 61212 - DNA, 29 bp, Homo sapiens
  source 1..29: mol_type = genomic DNA
ttggtggtgcagtggtagaattctcgcct

SEQ ID NO: 61213 - DNA, 37 bp, Homo sapiens; identical to SEQ ID NO: 9433
  source 1..37: mol_type = genomic DNA

SEQ ID NO: 61214 - DNA, 42 bp, Homo sapiens; identical to SEQ ID NO: 28478
  source 1..42: mol_type = genomic DNA

SEQ ID NO: 61215 - DNA, 20 bp, Homo sapiens
  source 1..20: mol_type = genomic DNA
tagctcagtcggtagagcat

SEQ ID NO: 61216 - DNA, 35 bp, Homo sapiens; identical to SEQ ID NO: 5206
  source 1..35: mol_type = genomic DNA

SEQ ID NO: 61217 - DNA, 31 bp, Homo sapiens; identical to SEQ ID NO: 10931
  source 1..31: mol_type = genomic DNA

SEQ ID NO: 61218 - DNA, 28 bp, Homo sapiens
  source 1..28: mol_type = genomic DNA
tcagtctcataatctgaaggtcgtgagt

SEQ ID NO: 61219 - DNA, 16 bp, Homo sapiens
  source 1..16: mol_type = genomic DNA
atagctcagtggtaga

SEQ ID NO: 61220 - DNA, 48 bp, Homo sapiens; identical to SEQ ID NO: 6769
  source 1..48: mol_type = genomic DNA

SEQ ID NO: 61221 - DNA, 48 bp, Homo sapiens; identical to SEQ ID NO: 12102
  source 1..48: mol_type = genomic DNA

SEQ ID NO: 61222 - DNA, 23 bp, Homo sapiens
  source 1..23: mol_type = genomic DNA
taggattcggcgctttcaccgcc

SEQ ID NO: 61223 - DNA, 27 bp, Homo sapiens
  source 1..27: mol_type = genomic DNA
agggtcgtgggttcgagccccacgttg

SEQ ID NO: 61224 - DNA, 16 bp, Homo sapiens
  source 1..16: mol_type = genomic DNA
aaaaattttggtgcaa

SEQ ID NO: 61225 - DNA, 33 bp, Homo sapiens; identical to SEQ ID NO: 9964
  source 1..33: mol_type = genomic DNA

SEQ ID NO: 61226 - DNA, 29 bp, Homo sapiens
  source 1..29: mol_type = genomic DNA
tgtaatggttagcactctggactttgaat

SEQ ID NO: 61227 - DNA, 33 bp, Homo sapiens; identical to SEQ ID NO: 8120
  source 1..33: mol_type = genomic DNA

SEQ ID NO: 61228 - DNA, 42 bp, Homo sapiens; identical to SEQ ID NO: 23928
  source 1..42: mol_type = genomic DNA

SEQ ID NO: 61229 - DNA, 30 bp, Homo sapiens; identical to SEQ ID NO: 27266
  source 1..30: mol_type = genomic DNA

SEQ ID NO: 61230 - DNA, 31 bp, Homo sapiens; identical to SEQ ID NO: 29224
  source 1..31: mol_type = genomic DNA

SEQ ID NO: 61231 - DNA, 26 bp, Homo sapiens
  source 1..26: mol_type = genomic DNA
tcacacgcgaaaggtccccggttcga

SEQ ID NO: 61232 - DNA, 37 bp, Homo sapiens; identical to SEQ ID NO: 19527
  source 1..37: mol_type = genomic DNA

SEQ ID NO: 61233 - DNA, 29 bp, Homo sapiens
  source 1..29: mol_type = genomic DNA
ttagtatagtggtgagtatccccgcctgt

SEQ ID NO: 61234 - DNA, 32 bp, Homo sapiens; identical to SEQ ID NO: 12248
  source 1..32: mol_type = genomic DNA

SEQ ID NO: 61235 - DNA, 25 bp, Homo sapiens
  source 1..25: mol_type = genomic DNA
tcataatctgaaggtcgtgagttcg

SEQ ID NO: 61236 - DNA, 42 bp, Homo sapiens; identical to SEQ ID NO: 13759
  source 1..42: mol_type = genomic DNA

SEQ ID NO: 61237 - DNA, 41 bp, Homo sapiens; identical to SEQ ID NO: 14844
  source 1..41: mol_type = genomic DNA

SEQ ID NO: 61238 - DNA, 30 bp, Homo sapiens; identical to SEQ ID NO: 9055
  source 1..30: mol_type = genomic DNA

SEQ ID NO: 61239 - DNA, 36 bp, Homo sapiens; identical to SEQ ID NO: 25868
  source 1..36: mol_type = genomic DNA

SEQ ID NO: 61240 - DNA, 29 bp, Homo sapiens
  source 1..29: mol_type = genomic DNA
cagcggaagcgtgctgggcccataaccca

SEQ ID NO: 61241 - DNA, 23 bp, Homo sapiens
  source 1..23: mol_type = genomic DNA
gaattgcaaattcgaagaagcag

SEQ ID NO: 61242 - DNA, 31 bp, Homo sapiens; identical to SEQ ID NO: 25062
  source 1..31: mol_type = genomic DNA

SEQ ID NO: 61243 - DNA, 32 bp, Homo sapiens; identical to SEQ ID NO: 18677
  source 1..32: mol_type = genomic DNA

SEQ ID NO: 61244 - DNA, 41 bp, Homo sapiens; identical to SEQ ID NO: 1523
  source 1..41: mol_type = genomic DNA

SEQ ID NO: 61245 - DNA, 25 bp, Homo sapiens
  source 1..25: mol_type = genomic DNA
ggatagctcagtcggtagagcatca

SEQ ID NO: 61246 - DNA, 32 bp, Homo sapiens; identical to SEQ ID NO: 12040
  source 1..32: mol_type = genomic DNA

SEQ ID NO: 61247 - DNA, 29 bp, Homo sapiens
  source 1..29: mol_type = genomic DNA
cagcaacctcggttcgaatccgagtcacg

SEQ ID NO: 61248 - DNA, 32 bp, Homo sapiens; identical to SEQ ID NO: 6952
  source 1..32: mol_type = genomic DNA

SEQ ID NO: 61249 - DNA, 32 bp, Homo sapiens; identical to SEQ ID NO: 3808
  source 1..32: mol_type = genomic DNA

SEQ ID NO: 61250 - DNA, 32 bp, Homo sapiens; identical to SEQ ID NO: 23721
  source 1..32: mol_type = genomic DNA

SEQ ID NO: 61251 - DNA, 41 bp, Homo sapiens; identical to SEQ ID NO: 4554
  source 1..41: mol_type = genomic DNA

SEQ ID NO: 61252 - DNA, 35 bp, Homo sapiens; identical to SEQ ID NO: 29696
  source 1..35: mol_type = genomic DNA

SEQ ID NO: 61253 - DNA, 39 bp, Homo sapiens; identical to SEQ ID NO: 15013
  source 1..39: mol_type = genomic DNA

SEQ ID NO: 61254 - DNA, 34 bp, Homo sapiens; identical to SEQ ID NO: 1768
  source 1..34: mol_type = genomic DNA

SEQ ID NO: 61255 - DNA, 28 bp, Homo sapiens
  source 1..28: mol_type = genomic DNA
agaatagtttaaattagaatcttagctt

SEQ ID NO: 61256 - DNA, 21 bp, Homo sapiens
  source 1..21: mol_type = genomic DNA
atgctttgcacgtatgaggcc

SEQ ID NO: 61257 - DNA, 21 bp, Homo sapiens
  source 1..21: mol_type = genomic DNA
tgtgatggccgagtggttaag

SEQ ID NO: 61258 - DNA, 43 bp, Homo sapiens; identical to SEQ ID NO: 30472
  source 1..43: mol_type = genomic DNA

SEQ ID NO: 61259 - DNA, 28 bp, Homo sapiens
  source 1..28: mol_type = genomic DNA
tcagtggtagaattctcgcctgccacgc

SEQ ID NO: 61260 - DNA, 17 bp, Homo sapiens
  source 1..17: mol_type = genomic DNA
tggttagcatagctgcc

SEQ ID NO: 61261 - DNA, 29 bp, Homo sapiens
  source 1..29: mol_type = genomic DNA
tctgaaggtcgtgagttcgagcctcacac

SEQ ID NO: 61262 - DNA, 27 bp, Homo sapiens
  source 1..27: mol_type = genomic DNA
aagttaaattataggctaaatcctata

SEQ ID NO: 61263 - DNA, 17 bp, Homo sapiens
  source 1..17: mol_type = genomic DNA
cagtcagtagagcatca

SEQ ID NO: 61264 - DNA, 32 bp, Homo sapiens; identical to SEQ ID NO: 29950
  source 1..32: mol_type = genomic DNA

SEQ ID NO: 61265 - DNA, 19 bp, Homo sapiens
  source 1..19: mol_type = genomic DNA
gttggtagagcatgggact

SEQ ID NO: 61266 - DNA, 32 bp, Homo sapiens; identical to SEQ ID NO: 10687
  source 1..32: mol_type = genomic DNA

SEQ ID NO: 61267 - DNA, 33 bp, Homo sapiens; identical to SEQ ID NO: 761
  source 1..33: mol_type = genomic DNA

SEQ ID NO: 61268 - DNA, 35 bp, Homo sapiens; identical to SEQ ID NO: 12750
  source 1..35: mol_type = genomic DNA

SEQ ID NO: 61269 - DNA, 33 bp, Homo sapiens; identical to SEQ ID NO: 23722
  source 1..33: mol_type = genomic DNA

SEQ ID NO: 61270 - DNA, 23 bp, Homo sapiens
  source 1..23: mol_type = genomic DNA
cgatccgagttcgagtctcggtg

SEQ ID NO: 61271 - DNA, 47 bp, Homo sapiens; identical to SEQ ID NO: 7579
  source 1..47: mol_type = genomic DNA

SEQ ID NO: 61272 - DNA, 48 bp, Homo sapiens; identical to SEQ ID NO: 12483
  source 1..48: mol_type = genomic DNA

SEQ ID NO: 61273 - DNA, 32 bp, Homo sapiens; identical to SEQ ID NO: 30424
  source 1..32: mol_type = genomic DNA

SEQ ID NO: 61274 - DNA, 23 bp, Homo sapiens
  source 1..23: mol_type = genomic DNA
atatgtctgataaaagagttact

SEQ ID NO: 61275 - DNA, 28 bp, Homo sapiens
  source 1..28: mol_type = genomic DNA
ttttagtataaatagtaccgttaacttc

SEQ ID NO: 61276 - DNA, 23 bp, Homo sapiens
  source 1..23: mol_type = genomic DNA
caatggggtctccccgcgcaggt

SEQ ID NO: 61277 - DNA, 18 bp, Homo sapiens
  source 1..18: mol_type = genomic DNA
gtgggtagagcatcagac

SEQ ID NO: 61278 - DNA, 37 bp, Homo sapiens; identical to SEQ ID NO: 30676
  source 1..37: mol_type = genomic DNA

SEQ ID NO: 61279 - DNA, 23 bp, Homo sapiens
  source 1..23: mol_type = genomic DNA
taagagaaccaacacctctttac

SEQ ID NO: 61280 - DNA, 42 bp, Homo sapiens; identical to SEQ ID NO: 7129
  source 1..42: mol_type = genomic DNA

SEQ ID NO: 61281 - DNA, 19 bp, Homo sapiens
  source 1..19: mol_type = genomic DNA
gtccgcgtgggttcgaacc

SEQ ID NO: 61282 - DNA, 45 bp, Homo sapiens; identical to SEQ ID NO: 17637
  source 1..45: mol_type = genomic DNA

SEQ ID NO: 61283 - DNA, 16 bp, Homo sapiens
  source 1..16: mol_type = genomic DNA
tttgatagagtaaata

SEQ ID NO: 61284 - DNA, 37 bp, Homo sapiens; identical to SEQ ID NO: 14327
  source 1..37: mol_type = genomic DNA

SEQ ID NO: 61285 - DNA, 29 bp, Homo sapiens
  source 1..29: mol_type = genomic DNA
tcagaaggttgcgtgttcaagtcacgtcg

SEQ ID NO: 61286 - DNA, 24 bp, Homo sapiens
  source 1..24: mol_type = genomic DNA
tttatgtagcttacctcctcaaag

SEQ ID NO: 61287 - DNA, 34 bp, Homo sapiens; identical to SEQ ID NO: 15127
  source 1..34: mol_type = genomic DNA

SEQ ID NO: 61288 - DNA, 33 bp, Homo sapiens; identical to SEQ ID NO: 21012
  source 1..33: mol_type = genomic DNA

SEQ ID NO: 61289 - DNA, 27 bp, Homo sapiens
  source 1..27: mol_type = genomic DNA
ctcaccgccgcggcccgggttcgattc

SEQ ID NO: 61290 - DNA, 31 bp, Homo sapiens; identical to SEQ ID NO: 10959
  source 1..31: mol_type = genomic DNA

SEQ ID NO: 61291 - DNA, 16 bp, Homo sapiens
  source 1..16: mol_type = genomic DNA
taatggtgagcactct

SEQ ID NO: 61292 - DNA, 22 bp, Homo sapiens
  source 1..22: mol_type = genomic DNA
gtccgcgtgggttcgaacccca

SEQ ID NO: 61293 - DNA, 22 bp, Homo sapiens
  source 1..22: mol_type = genomic DNA
atcagaagattccaggttcgac

SEQ ID NO: 61294 - DNA, 33 bp, Homo sapiens; identical to SEQ ID NO: 19369
  source 1..33: mol_type = genomic DNA

SEQ ID NO: 61295 - DNA, 16 bp, Homo sapiens
  source 1..16: mol_type = genomic DNA
ctcttagcgcagtggg

SEQ ID NO: 61296 - DNA, 36 bp, Homo sapiens; identical to SEQ ID NO: 19222
  source 1..36: mol_type = genomic DNA

SEQ ID NO: 61297 - DNA, 48 bp, Homo sapiens; identical to SEQ ID NO: 18379
  source 1..48: mol_type = genomic DNA

SEQ ID NO: 61298 - DNA, 27 bp, Homo sapiens
  source 1..27: mol_type = genomic DNA
atcttagctttgggtgctaatggtgga

SEQ ID NO: 61299 - DNA, 18 bp, Homo sapiens
  source 1..18: mol_type = genomic DNA
caatggaggcgtgggttc

SEQ ID NO: 61300 - DNA, 28 bp, Homo sapiens
  source 1..28: mol_type = genomic DNA
cagaagattccaggttcgactcctggct

SEQ ID NO: 61301 - DNA, 20 bp, Homo sapiens
  source 1..20: mol_type = genomic DNA
tcataatctgaaggtcgtga

SEQ ID NO: 61302 - DNA, 32 bp, Homo sapiens; identical to SEQ ID NO: 29099
  source 1..32: mol_type = genomic DNA

SEQ ID NO: 61303 - DNA, 31 bp, Homo sapiens; identical to SEQ ID NO: 8279
  source 1..31: mol_type = genomic DNA

SEQ ID NO: 61304 - DNA, 25 bp, Homo sapiens
  source 1..25: mol_type = genomic DNA
ctaagtgtttgtgggtttaagtccc

SEQ ID NO: 61305 - DNA, 30 bp, Homo sapiens; identical to SEQ ID NO: 26320
  source 1..30: mol_type = genomic DNA

SEQ ID NO: 61306 - DNA, 34 bp, Homo sapiens; identical to SEQ ID NO: 14298
  source 1..34: mol_type = genomic DNA

SEQ ID NO: 61307 - DNA, 34 bp, Homo sapiens; identical to SEQ ID NO: 21823
  source 1..34: mol_type = genomic DNA

SEQ ID NO: 61308 - DNA, 48 bp, Homo sapiens; identical to SEQ ID NO: 16444
  source 1..48: mol_type = genomic DNA

SEQ ID NO: 61309 - DNA, 31 bp, Homo sapiens; identical to SEQ ID NO: 14077
  source 1..31: mol_type = genomic DNA

SEQ ID NO: 61310 - DNA, 37 bp, Homo sapiens; identical to SEQ ID NO: 1427
  source 1..37: mol_type = genomic DNA

SEQ ID NO: 61311 - DNA, 34 bp, Homo sapiens; identical to SEQ ID NO: 867
  source 1..34: mol_type = genomic DNA

SEQ ID NO: 61312 - DNA, 25 bp, Homo sapiens
  source 1..25: mol_type = genomic DNA
atcagattgtgaatctgacaacaga

SEQ ID NO: 61313 - DNA, 28 bp, Homo sapiens
  source 1..28: mol_type = genomic DNA
gtcgtgagttcgatcctcacacggggca

SEQ ID NO: 61314 - DNA, 43 bp, Homo sapiens; identical to SEQ ID NO: 20372
  source 1..43: mol_type = genomic DNA

SEQ ID NO: 61315 - DNA, 18 bp, Homo sapiens
  source 1..18: mol_type = genomic DNA
ctggtgtagtggtatcat

SEQ ID NO: 61316 - DNA, 47 bp, Homo sapiens; identical to SEQ ID NO: 12101
  source 1..47: mol_type = genomic DNA

SEQ ID NO: 61317 - DNA, 18 bp, Homo sapiens
  source 1..18: mol_type = genomic DNA
taggtagcgcatcagtct

SEQ ID NO: 61318 - DNA, 26 bp, Homo sapiens
  source 1..26: mol_type = genomic DNA
cgcctgccacgcgggaggcccgggtt

SEQ ID NO: 61319 - DNA, 43 bp, Homo sapiens; identical to SEQ ID NO: 19130
  source 1..43: mol_type = genomic DNA

SEQ ID NO: 61320 - DNA, 34 bp, Homo sapiens; identical to SEQ ID NO: 29186
  source 1..34: mol_type = genomic DNA

SEQ ID NO: 61321 - DNA, 26 bp, Homo sapiens
  source 1..26: mol_type = genomic DNA
ttttggtgcaactccaaataaaagta

SEQ ID NO: 61322 - DNA, 36 bp, Homo sapiens; identical to SEQ ID NO: 9779
  source 1..36: mol_type = genomic DNA

SEQ ID NO: 61323 - DNA, 33 bp, Homo sapiens; identical to SEQ ID NO: 16542
  source 1..33: mol_type = genomic DNA

SEQ ID NO: 61324 - DNA, 20 bp, Homo sapiens
  source 1..20: mol_type = genomic DNA
atcagaaggctgcgtgttcg

SEQ ID NO: 61325 - DNA, 48 bp, Homo sapiens; identical to SEQ ID NO: 14981
  source 1..48: mol_type = genomic DNA

SEQ ID NO: 61326 - DNA, 35 bp, Homo sapiens; identical to SEQ ID NO: 20574
  source 1..35: mol_type = genomic DNA

SEQ ID NO: 61327 - DNA, 40 bp, Homo sapiens; identical to SEQ ID NO: 23812
  source 1..40: mol_type = genomic DNA

SEQ ID NO: 61328 - DNA, 27 bp, Homo sapiens
  source 1..27: mol_type = genomic DNA
atgaggccccgggttcgatccccggca

SEQ ID NO: 61329 - DNA, 31 bp, Homo sapiens; identical to SEQ ID NO: 18841
  source 1..31: mol_type = genomic DNA

SEQ ID NO: 61330 - DNA, 32 bp, Homo sapiens; identical to SEQ ID NO: 25760
  source 1..32: mol_type = genomic DNA

SEQ ID NO: 61331 - DNA, 34 bp, Homo sapiens; identical to SEQ ID NO: 2365
  source 1..34: mol_type = genomic DNA

SEQ ID NO: 61332 - DNA, 43 bp, Homo sapiens; identical to SEQ ID NO: 21782
  source 1..43: mol_type = genomic DNA

SEQ ID NO: 61333 - DNA, 30 bp, Homo sapiens; identical to SEQ ID NO: 8321
  source 1..30: mol_type = genomic DNA

SEQ ID NO: 61334 - DNA, 48 bp, Homo sapiens; identical to SEQ ID NO: 13921
  source 1..48: mol_type = genomic DNA

SEQ ID NO: 61335 - DNA, 30 bp, Homo sapiens; identical to SEQ ID NO: 17141
  source 1..30: mol_type = genomic DNA

SEQ ID NO: 61336 - DNA, 30 bp, Homo sapiens; identical to SEQ ID NO: 5130
  source 1..30: mol_type = genomic DNA

SEQ ID NO: 61337 - DNA, 29 bp, Homo sapiens
  source 1..29: mol_type = genomic DNA
ctcctcgttagtatagtggtgagtatccc

SEQ ID NO: 61338 - DNA, 34 bp, Homo sapiens; identical to SEQ ID NO: 3107
  source 1..34: mol_type = genomic DNA

SEQ ID NO: 61339 - DNA, 21 bp, Homo sapiens
  source 1..21: mol_type = genomic DNA
cctaatggataaggcactggc

SEQ ID NO: 61340 - DNA, 19 bp, Homo sapiens
  source 1..19: mol_type = genomic DNA
gtgttcaagtcacgtcggg

SEQ ID NO: 61341 - DNA, 17 bp, Homo sapiens
  source 1..17: mol_type = genomic DNA
aaaccatttcataactt

SEQ ID NO: 61342 - DNA, 25 bp, Homo sapiens
  source 1..25: mol_type = genomic DNA
gtaatcgcataaaacttaaaacttt

SEQ ID NO: 61343 - DNA, 29 bp, Homo sapiens
  source 1..29: mol_type = genomic DNA
cgcagcaacctcggttcgaatccgagtca

SEQ ID NO: 61344 - DNA, 30 bp, Homo sapiens; identical to SEQ ID NO: 4733
  source 1..30: mol_type = genomic DNA

SEQ ID NO: 61345 - DNA, 35 bp, Homo sapiens; identical to SEQ ID NO: 2044
  source 1..35: mol_type = genomic DNA

SEQ ID NO: 61346 - DNA, 26 bp, Homo sapiens
  source 1..26: mol_type = genomic DNA
ctgataaaagagttactttgatagag

SEQ ID NO: 61347 - DNA, 34 bp, Homo sapiens; identical to SEQ ID NO: 16730
  source 1..34: mol_type = genomic DNA

SEQ ID NO: 61348 - DNA, 45 bp, Homo sapiens; identical to SEQ ID NO: 20414
  source 1..45: mol_type = genomic DNA

SEQ ID NO: 61349 - DNA, 39 bp, Homo sapiens; identical to SEQ ID NO: 15139
  source 1..39: mol_type = genomic DNA

SEQ ID NO: 61350 - DNA, 35 bp, Homo sapiens; identical to SEQ ID NO: 23360
  source 1..35: mol_type = genomic DNA

SEQ ID NO: 61351 - DNA, 27 bp, Homo sapiens
  source 1..27: mol_type = genomic DNA
aaagcaatacactgaaaatgtttagac

SEQ ID NO: 61352 - DNA, 44 bp, Homo sapiens; identical to SEQ ID NO: 1328
  source 1..44: mol_type = genomic DNA

SEQ ID NO: 61353 - DNA, 29 bp, Homo sapiens
  source 1..29: mol_type = genomic DNA
atccattggtcttaggccccaaaaatttt

SEQ ID NO: 61354 - DNA, 27 bp, Homo sapiens
  source 1..27: mol_type = genomic DNA
caggtggcccgggttcgactcccggta

SEQ ID NO: 61355 - DNA, 45 bp, Homo sapiens; identical to SEQ ID NO: 23913
  source 1..45: mol_type = genomic DNA

SEQ ID NO: 61356 - DNA, 37 bp, Homo sapiens; identical to SEQ ID NO: 9219
  source 1..37: mol_type = genomic DNA

SEQ ID NO: 61357 - DNA, 31 bp, Homo sapiens; identical to SEQ ID NO: 15400
  source 1..31: mol_type = genomic DNA

SEQ ID NO: 61358 - DNA, 32 bp, Homo sapiens; identical to SEQ ID NO: 11032
  source 1..32: mol_type = genomic DNA

SEQ ID NO: 61359 - DNA, 32 bp, Homo sapiens; identical to SEQ ID NO: 25979
  source 1..32: mol_type = genomic DNA

SEQ ID NO: 61360 - DNA, 37 bp, Homo sapiens; identical to SEQ ID NO: 26704
  source 1..37: mol_type = genomic DNA

SEQ ID NO: 61361 - DNA, 40 bp, Homo sapiens; identical to SEQ ID NO: 11251
  source 1..40: mol_type = genomic DNA

SEQ ID NO: 61362 - DNA, 34 bp, Homo sapiens; identical to SEQ ID NO: 6350
  source 1..34: mol_type = genomic DNA

SEQ ID NO: 61363 - DNA, 31 bp, Homo sapiens; identical to SEQ ID NO: 15010
  source 1..31: mol_type = genomic DNA

SEQ ID NO: 61364 - DNA, 34 bp, Homo sapiens; identical to SEQ ID NO: 16597
  source 1..34: mol_type = genomic DNA

SEQ ID NO: 61365 - DNA, 35 bp, Homo sapiens; identical to SEQ ID NO: 1481
  source 1..35: mol_type = genomic DNA

SEQ ID NO: 61366 - DNA, 26 bp, Homo sapiens
  source 1..26: mol_type = genomic DNA
acccaacttacacttaggagatttca

SEQ ID NO: 61367 - DNA, 34 bp, Homo sapiens; identical to SEQ ID NO: 1489
  source 1..34: mol_type = genomic DNA

SEQ ID NO: 61368 - DNA, 19 bp, Homo sapiens
  source 1..19: mol_type = genomic DNA
gttgaaatacaacgatggt

SEQ ID NO: 61369 - DNA, 33 bp, Homo sapiens; identical to SEQ ID NO: 16698
  source 1..33: mol_type = genomic DNA

SEQ ID NO: 61370 - DNA, 48 bp, Homo sapiens; identical to SEQ ID NO: 8764
  source 1..48: mol_type = genomic DNA

SEQ ID NO: 61371 - DNA, 31 bp, Homo sapiens; identical to SEQ ID NO: 17977
  source 1..31: mol_type = genomic DNA

SEQ ID NO: 61372 - DNA, 24 bp, Homo sapiens
  source 1..24: mol_type = genomic DNA
aacagaggcttacgaccccttatt

SEQ ID NO: 61373 - DNA, 41 bp, Homo sapiens; identical to SEQ ID NO: 17828
  source 1..41: mol_type = genomic DNA

SEQ ID NO: 61374 - DNA, 27 bp, Homo sapiens
  source 1..27: mol_type = genomic DNA
gtgctaatggtggagttaaagactttt

SEQ ID NO: 61375 - DNA, 34 bp, Homo sapiens; identical to SEQ ID NO: 17726
  source 1..34: mol_type = genomic DNA

SEQ ID NO: 61376 - DNA, 38 bp, Homo sapiens; identical to SEQ ID NO: 22693
  source 1..38: mol_type = genomic DNA

SEQ ID NO: 61377 - DNA, 29 bp, Homo sapiens
  source 1..29: mol_type = genomic DNA
cggaggcgtgggttcgaatcccaccgctg

SEQ ID NO: 61378 - DNA, 34 bp, Homo sapiens; identical to SEQ ID NO: 4384
  source 1..34: mol_type = genomic DNA

SEQ ID NO: 61379 - DNA, 37 bp, Homo sapiens; identical to SEQ ID NO: 12903
  source 1..37: mol_type = genomic DNA

SEQ ID NO: 61380 - DNA, 45 bp, Homo sapiens; identical to SEQ ID NO: 19314
  source 1..45: mol_type = genomic DNA

SEQ ID NO: 61381 - DNA, 37 bp, Homo sapiens; identical to SEQ ID NO: 28537
  source 1..37: mol_type = genomic DNA

SEQ ID NO: 61382 - DNA, 32 bp, Homo sapiens; identical to SEQ ID NO: 11147
  source 1..32: mol_type = genomic DNA

SEQ ID NO: 61383 - DNA, 48 bp, Homo sapiens; identical to SEQ ID NO: 10680
  source 1..48: mol_type = genomic DNA

SEQ ID NO: 61384 - DNA, 30 bp, Homo sapiens; identical to SEQ ID NO: 26938
  source 1..30: mol_type = genomic DNA

SEQ ID NO: 61385 - DNA, 29 bp, Homo sapiens
  source 1..29: mol_type = genomic DNA
gccctcagtaagttgcaatacttaatttc

SEQ ID NO: 61386 - DNA, 28 bp, Homo sapiens
  source 1..28: mol_type = genomic DNA
cagcggaagcgtgctgggcccataaccc

SEQ ID NO: 61387 - DNA, 48 bp, Homo sapiens; identical to SEQ ID NO: 3325
  source 1..48: mol_type = genomic DNA

SEQ ID NO: 61388 - DNA, 34 bp, Homo sapiens; identical to SEQ ID NO: 5072
  source 1..34: mol_type = genomic DNA

SEQ ID NO: 61389 - DNA, 21 bp, Homo sapiens
  source 1..21: mol_type = genomic DNA
tgaaaccagctttggggggtt

SEQ ID NO: 61390 - DNA, 20 bp, Homo sapiens
  source 1..20: mol_type = genomic DNA
attttggtgcaactccaaat

SEQ ID NO: 61391 - DNA, 32 bp, Homo sapiens; identical to SEQ ID NO: 448
  source 1..32: mol_type = genomic DNA

SEQ ID NO: 61392 - DNA, 38 bp, Homo sapiens; identical to SEQ ID NO: 12752
  source 1..38: mol_type = genomic DNA

SEQ ID NO: 61393 - DNA, 34 bp, Homo sapiens; identical to SEQ ID NO: 6678
  source 1..34: mol_type = genomic DNA

SEQ ID NO: 61394 - DNA, 19 bp, Homo sapiens
  source 1..19: mol_type = genomic DNA
taattcaaaggttccgggt

SEQ ID NO: 61395 - DNA, 31 bp, Homo sapiens; identical to SEQ ID NO: 26658
  source 1..31: mol_type = genomic DNA

SEQ ID NO: 61396 - DNA, 19 bp, Homo sapiens
  source 1..19: mol_type = genomic DNA
gtatcatgcaagattccca

SEQ ID NO: 61397 - DNA, 40 bp, Homo sapiens; identical to SEQ ID NO: 30707
  source 1..40: mol_type = genomic DNA

SEQ ID NO: 61398 - DNA, 28 bp, Homo sapiens
  source 1..28: mol_type = genomic DNA
catgatcgtatagtggttagtactctgc

SEQ ID NO: 61399 - DNA, 38 bp, Homo sapiens; identical to SEQ ID NO: 2340
  source 1..38: mol_type = genomic DNA

SEQ ID NO: 61400 - DNA, 33 bp, Homo sapiens; identical to SEQ ID NO: 13988
  source 1..33: mol_type = genomic DNA

SEQ ID NO: 61401 - DNA, 29 bp, Homo sapiens
  source 1..29: mol_type = genomic DNA
tggtatagtggtgagcatagctgccttcc

SEQ ID NO: 61402 - DNA, 48 bp, Homo sapiens; identical to SEQ ID NO: 3662
  source 1..48: mol_type = genomic DNA

SEQ ID NO: 61403 - DNA, 19 bp, Homo sapiens
  source 1..19: mol_type = genomic DNA
cctggtggtctagtggcta

SEQ ID NO: 61404 - DNA, 19 bp, Homo sapiens
  source 1..19: mol_type = genomic DNA
agctgttaactaagtgttt

SEQ ID NO: 61405 - DNA, 24 bp, Homo sapiens
  source 1..24: mol_type = genomic DNA
atggacatatgtccgcgtgggttc

SEQ ID NO: 61406 - DNA, 35 bp, Homo sapiens; identical to SEQ ID NO: 16405
  source 1..35: mol_type = genomic DNA

SEQ ID NO: 61407 - DNA, 33 bp, Homo sapiens; identical to SEQ ID NO: 25863
  source 1..33: mol_type = genomic DNA

SEQ ID NO: 61408 - DNA, 41 bp, Homo sapiens; identical to SEQ ID NO: 20161
  source 1..41: mol_type = genomic DNA

SEQ ID NO: 61409 - DNA, 29 bp, Homo sapiens
  source 1..29: mol_type = genomic DNA
cagttgacccgggttcgattcccggccaa

SEQ ID NO: 61410 - DNA, 25 bp, Homo sapiens
  source 1..25: mol_type = genomic DNA
tctgaatccagcgatccgagttcga

SEQ ID NO: 61411 - DNA, 16 bp, Homo sapiens
  source 1..16: mol_type = genomic DNA
accgagcggaaacacc

SEQ ID NO: 61412 - DNA, 30 bp, Homo sapiens; identical to SEQ ID NO: 6826
  source 1..30: mol_type = genomic DNA

SEQ ID NO: 61413 - DNA, 34 bp, Homo sapiens; identical to SEQ ID NO: 783
  source 1..34: mol_type = genomic DNA

SEQ ID NO: 61414 - DNA, 30 bp, Homo sapiens; identical to SEQ ID NO: 19403
  source 1..30: mol_type = genomic DNA

SEQ ID NO: 61415 - DNA, 23 bp, Homo sapiens
  source 1..23: mol_type = genomic DNA
tagagcatcagacttttaatctg

SEQ ID NO: 61416 - DNA, 31 bp, Homo sapiens; identical to SEQ ID NO: 24950
  source 1..31: mol_type = genomic DNA

SEQ ID NO: 61417 - DNA, 29 bp, Homo sapiens
  source 1..29: mol_type = genomic DNA
tgcacgcgtgggttcgaatcccatcctcg

SEQ ID NO: 61418 - DNA, 37 bp, Homo sapiens; identical to SEQ ID NO: 5419
  source 1..37: mol_type = genomic DNA

SEQ ID NO: 61419 - DNA, 30 bp, Homo sapiens; identical to SEQ ID NO: 7682
  source 1..30: mol_type = genomic DNA

SEQ ID NO: 61420 - DNA, 27 bp, Homo sapiens
  source 1..27: mol_type = genomic DNA
agaggtcgatggatcgaaaccatcctc

SEQ ID NO: 61421 - DNA, 32 bp, Homo sapiens; identical to SEQ ID NO: 13057
  source 1..32: mol_type = genomic DNA

SEQ ID NO: 61422 - DNA, 38 bp, Homo sapiens; identical to SEQ ID NO: 12098
  source 1..38: mol_type = genomic DNA

SEQ ID NO: 61423 - DNA, 35 bp, Homo sapiens; identical to SEQ ID NO: 2337
  source 1..35: mol_type = genomic DNA

SEQ ID NO: 61424 - DNA, 32 bp, Homo sapiens; identical to SEQ ID NO: 21946
  source 1..32: mol_type = genomic DNA

SEQ ID NO: 61425 - DNA, 24 bp, Homo sapiens
  source 1..24: mol_type = genomic DNA
cttagctgttaactaagtgtttgt

SEQ ID NO: 61426 - DNA, 22 bp, Homo sapiens
  source 1..22: mol_type = genomic DNA
acccagtggcctaatggataag

SEQ ID NO: 61427 - DNA, 28 bp, Homo sapiens
  source 1..28: mol_type = genomic DNA
cgcagaaggtcctgggttcgagccccag

SEQ ID NO: 61428 - DNA, 34 bp, Homo sapiens; identical to SEQ ID NO: 21361
  source 1..34: mol_type = genomic DNA

SEQ ID NO: 61429 - DNA, 40 bp, Homo sapiens; identical to SEQ ID NO: 30793
  source 1..40: mol_type = genomic DNA

SEQ ID NO: 61430 - DNA, 19 bp, Homo sapiens
  source 1..19: mol_type = genomic DNA
taaataataggagcttaaa

SEQ ID NO: 61431 - DNA, 23 bp, Homo sapiens
  source 1..23: mol_type = genomic DNA
aggttcaattcctcttcttaaca

SEQ ID NO: 61432 - DNA, 35 bp, Homo sapiens; identical to SEQ ID NO: 11542
  source 1..35: mol_type = genomic DNA

SEQ ID NO: 61433 - DNA, 18 bp, Homo sapiens
  source 1..18: mol_type = genomic DNA
tttggattctcagggatg

SEQ ID NO: 61434 - DNA, 44 bp, Homo sapiens; identical to SEQ ID NO: 27956
  source 1..44: mol_type = genomic DNA

SEQ ID NO: 61435 - DNA, 35 bp, Homo sapiens; identical to SEQ ID NO: 31013
  source 1..35: mol_type = genomic DNA

SEQ ID NO: 61436 - DNA, 38 bp, Homo sapiens; identical to SEQ ID NO: 14843
  source 1..38: mol_type = genomic DNA

SEQ ID NO: 61437 - DNA, 31 bp, Homo sapiens; identical to SEQ ID NO: 23401
  source 1..31: mol_type = genomic DNA

SEQ ID NO: 61438 - DNA, 27 bp, Homo sapiens
  source 1..27: mol_type = genomic DNA
ccggggttcaagtccctgttcgggcgc

SEQ ID NO: 61439 - DNA, 48 bp, Homo sapiens; identical to SEQ ID NO: 23238
  source 1..48: mol_type = genomic DNA

SEQ ID NO: 61440 - DNA, 33 bp, Homo sapiens; identical to SEQ ID NO: 6349
  source 1..33: mol_type = genomic DNA

SEQ ID NO: 61441 - DNA, 19 bp, Homo sapiens
  source 1..19: mol_type = genomic DNA
cataactttgtcaaagtta

SEQ ID NO: 61442 - DNA, 30 bp, Homo sapiens; identical to SEQ ID NO: 19631
  source 1..30: mol_type = genomic DNA

SEQ ID NO: 61443 - DNA, 34 bp, Homo sapiens; identical to SEQ ID NO: 4819
  source 1..34: mol_type = genomic DNA

SEQ ID NO: 61444 - DNA, 36 bp, Homo sapiens; identical to SEQ ID NO: 11558
  source 1..36: mol_type = genomic DNA

SEQ ID NO: 61445 - DNA, 26 bp, Homo sapiens
  source 1..26: mol_type = genomic DNA
caagcagttgacccgggttcgattcc

SEQ ID NO: 61446 - DNA, 16 bp, Homo sapiens
  source 1..16: mol_type = genomic DNA
tctccaatggaggcgt

SEQ ID NO: 61447 - DNA, 38 bp, Homo sapiens; identical to SEQ ID NO: 8878
  source 1..38: mol_type = genomic DNA

SEQ ID NO: 61448 - DNA, 19 bp, Homo sapiens
  source 1..19: mol_type = genomic DNA
tttcataactttgtcaaag

SEQ ID NO: 61449 - DNA, 19 bp, Homo sapiens
  source 1..19: mol_type = genomic DNA
tgtagcggttatcacattc

SEQ ID NO: 61450 - DNA, 26 bp, Homo sapiens
  source 1..26: mol_type = genomic DNA
ttactttgatagagtaaataatagga

SEQ ID NO: 61451 - DNA, 28 bp, Homo sapiens
  source 1..28: mol_type = genomic DNA
ctcgcctgccacgcgggaggcccgggtt

SEQ ID NO: 61452 - DNA, 31 bp, Homo sapiens; identical to SEQ ID NO: 3523
  source 1..31: mol_type = genomic DNA

SEQ ID NO: 61453 - DNA, 48 bp, Homo sapiens; identical to SEQ ID NO: 16935
  source 1..48: mol_type = genomic DNA

SEQ ID NO: 61454 - DNA, 42 bp, Homo sapiens; identical to SEQ ID NO: 6380
  source 1..42: mol_type = genomic DNA

SEQ ID NO: 61455 - DNA, 26 bp, Homo sapiens
  source 1..26: mol_type = genomic DNA
atcgcataaaacttaaaactttacag

SEQ ID NO: 61456 - DNA, 43 bp, Homo sapiens; identical to SEQ ID NO: 7575
  source 1..43: mol_type = genomic DNA

SEQ ID NO: 61457 - DNA, 27 bp, Homo sapiens
  source 1..27: mol_type = genomic DNA
agatcctgggttcgaatcccagcggtg

SEQ ID NO: 61458 - DNA, 20 bp, Homo sapiens
  source 1..20: mol_type = genomic DNA
tttgtcaaagttaaattata

SEQ ID NO: 61459 - DNA, 19 bp, Homo sapiens
  source 1..19: mol_type = genomic DNA
tttgtcaaagttaaattat

SEQ ID NO: 61460 - DNA, 48 bp, Homo sapiens; identical to SEQ ID NO: 1630
  source 1..48: mol_type = genomic DNA

SEQ ID NO: 61461 - DNA, 25 bp, Homo sapiens
  source 1..25: mol_type = genomic DNA
cgggggcgtgggttcgaatcccacc

SEQ ID NO: 61462 - DNA, 42 bp, Homo sapiens; identical to SEQ ID NO: 2194
  source 1..42: mol_type = genomic DNA

SEQ ID NO: 61463 - DNA, 20 bp, Homo sapiens
  source 1..20: mol_type = genomic DNA
acaacgatggtttttcatat

SEQ ID NO: 61464 - DNA, 44 bp, Homo sapiens; identical to SEQ ID NO: 30473
  source 1..44: mol_type = genomic DNA

SEQ ID NO: 61465 - DNA, 32 bp, Homo sapiens; identical to SEQ ID NO: 2752
  source 1..32: mol_type = genomic DNA

SEQ ID NO: 61466 - DNA, 27 bp, Homo sapiens
  source 1..27: mol_type = genomic DNA
ccatgtctaacaacatggctttctcac

SEQ ID NO: 61467 - DNA, 22 bp, Homo sapiens
  source 1..22: mol_type = genomic DNA
cccataccccgaaaatgttggt

SEQ ID NO: 61468 - DNA, 23 bp, Homo sapiens
  source 1..23: mol_type = genomic DNA
cagctttggggggttcgattcct

SEQ ID NO: 61469 - DNA, 36 bp, Homo sapiens; identical to SEQ ID NO: 20912
  source 1..36: mol_type = genomic DNA

SEQ ID NO: 61470 - DNA, 29 bp, Homo sapiens
  source 1..29: mol_type = genomic DNA
cataatctgaaggtcgtgagttcgagcct

SEQ ID NO: 61471 - DNA, 21 bp, Homo sapiens
  source 1..21: mol_type = genomic DNA
gggtggttcagtggtagaatt

SEQ ID NO: 61472 - DNA, 31 bp, Homo sapiens; identical to SEQ ID NO: 10114
  source 1..31: mol_type = genomic DNA

SEQ ID NO: 61473 - DNA, 19 bp, Homo sapiens
  source 1..19: mol_type = genomic DNA
gctttgcacgtatgaggcc

SEQ ID NO: 61474 - DNA, 32 bp, Homo sapiens; identical to SEQ ID NO: 15801
  source 1..32: mol_type = genomic DNA

SEQ ID NO: 61475 - DNA, 32 bp, Homo sapiens; identical to SEQ ID NO: 8248
  source 1..32: mol_type = genomic DNA

SEQ ID NO: 61476 - DNA, 22 bp, Homo sapiens
  source 1..22: mol_type = genomic DNA
gtcaaagttaaattataggcta

SEQ ID NO: 61477 - DNA, 31 bp, Homo sapiens; identical to SEQ ID NO: 9043
  source 1..31: mol_type = genomic DNA

SEQ ID NO: 61478 - DNA, 23 bp, Homo sapiens
  source 1..23: mol_type = genomic DNA
gtggtgagcatagctgccttcca

SEQ ID NO: 61479 - DNA, 24 bp, Homo sapiens
  source 1..24: mol_type = genomic DNA
tgagcatagctgccttccaagcag

SEQ ID NO: 61480 - DNA, 20 bp, Homo sapiens
  source 1..20: mol_type = genomic DNA
aggcgtgggttcgaatccca

SEQ ID NO: 61481 - DNA, 39 bp, Homo sapiens; identical to SEQ ID NO: 20159
  source 1..39: mol_type = genomic DNA

SEQ ID NO: 61482 - DNA, 32 bp, Homo sapiens; identical to SEQ ID NO: 16529
  source 1..32: mol_type = genomic DNA

SEQ ID NO: 61483 - DNA, 35 bp, Homo sapiens; identical to SEQ ID NO: 5853
  source 1..35: mol_type = genomic DNA

SEQ ID NO: 61484 - DNA, 39 bp, Homo sapiens; identical to SEQ ID NO: 27753
  source 1..39: mol_type = genomic DNA

SEQ ID NO: 61485 - DNA, 23 bp, Homo sapiens
  source 1..23: mol_type = genomic DNA
ctgaaggtcgtgagttcgagcct

SEQ ID NO: 61486 - DNA, 23 bp, Homo sapiens
  source 1..23: mol_type = genomic DNA
atagtgtagtggttatcacgtct

SEQ ID NO: 61487 - DNA, 45 bp, Homo sapiens; identical to SEQ ID NO: 23236
  source 1..45: mol_type = genomic DNA

SEQ ID NO: 61488 - DNA, 39 bp, Homo sapiens; identical to SEQ ID NO: 7539
  source 1..39: mol_type = genomic DNA

SEQ ID NO: 61489 - DNA, 30 bp, Homo sapiens; identical to SEQ ID NO: 16394
  source 1..30: mol_type = genomic DNA

SEQ ID NO: 61490 - DNA, 38 bp, Homo sapiens; identical to SEQ ID NO: 7570
  source 1..38: mol_type = genomic DNA

SEQ ID NO: 61491 - DNA, 46 bp, Homo sapiens; identical to SEQ ID NO: 17899
  source 1..46: mol_type = genomic DNA

SEQ ID NO: 61492 - DNA, 28 bp, Homo sapiens
  source 1..28: mol_type = genomic DNA
tcggaggcgtgggttcgaatcccaccgc

SEQ ID NO: 61493 - DNA, 29 bp, Homo sapiens
  source 1..29: mol_type = genomic DNA
gaaggctgcgtgttcgaatcacgtcgggg

SEQ ID NO: 61494 - DNA, 16 bp, Homo sapiens
  source 1..16: mol_type = genomic DNA
ttagcgcagtaggtag

SEQ ID NO: 61495 - DNA, 30 bp, Homo sapiens; identical to SEQ ID NO: 9228
  source 1..30: mol_type = genomic DNA

SEQ ID NO: 61496 - DNA, 33 bp, Homo sapiens; identical to SEQ ID NO: 18529
  source 1..33: mol_type = genomic DNA

SEQ ID NO: 61497 - DNA, 40 bp, Homo sapiens; identical to SEQ ID NO: 17827
  source 1..40: mol_type = genomic DNA

SEQ ID NO: 61498 - DNA, 30 bp, Homo sapiens; identical to SEQ ID NO: 12052
  source 1..30: mol_type = genomic DNA

SEQ ID NO: 61499 - DNA, 30 bp, Homo sapiens; identical to SEQ ID NO: 18489
  source 1..30: mol_type = genomic DNA

SEQ ID NO: 61500 - DNA, 46 bp, Homo sapiens; identical to SEQ ID NO: 7011
  source 1..46: mol_type = genomic DNA

SEQ ID NO: 61501 - DNA, 17 bp, Homo sapiens
  source 1..17: mol_type = genomic DNA
caacgatggtttttcat

SEQ ID NO: 61502 - DNA, 27 bp, Homo sapiens
  source 1..27: mol_type = genomic DNA
gggggcatagctcagtggtagagcatt

SEQ ID NO: 61503 - DNA, 19 bp, Homo sapiens
  source 1..19: mol_type = genomic DNA
ccctggtggtctagtggct

SEQ ID NO: 61504 - DNA, 48 bp, Homo sapiens; identical to SEQ ID NO: 1889
  source 1..48: mol_type = genomic DNA

SEQ ID NO: 61505 - DNA, 29 bp, Homo sapiens
  source 1..29: mol_type = genomic DNA
acgcgggagaccggggttcaattccccga

SEQ ID NO: 61506 - DNA, 19 bp, Homo sapiens
  source 1..19: mol_type = genomic DNA
taaaacttaaaactttaca

SEQ ID NO: 61507 - DNA, 36 bp, Homo sapiens; identical to SEQ ID NO: 16345
  source 1..36: mol_type = genomic DNA

SEQ ID NO: 61508 - DNA, 21 bp, Homo sapiens
  source 1..21: mol_type = genomic DNA
taggagcttaaacccccttat

SEQ ID NO: 61509 - DNA, 33 bp, Homo sapiens; identical to SEQ ID NO: 24951
  source 1..33: mol_type = genomic DNA

SEQ ID NO: 61510 - DNA, 39 bp, Homo sapiens; identical to SEQ ID NO: 12099
  source 1..39: mol_type = genomic DNA

SEQ ID NO: 61511 - DNA, 34 bp, Homo sapiens; identical to SEQ ID NO: 24381
  source 1..34: mol_type = genomic DNA

SEQ ID NO: 61512 - DNA, 27 bp, Homo sapiens
  source 1..27: mol_type = genomic DNA
tgtagtggtatcatgcaagattcccat

SEQ ID NO: 61513 - DNA, 19 bp, Homo sapiens
  source 1..19: mol_type = genomic DNA
cttaattaaagtggctgat

SEQ ID NO: 61514 - DNA, 40 bp, Homo sapiens; identical to SEQ ID NO: 31041
  source 1..40: mol_type = genomic DNA

SEQ ID NO: 61515 - DNA, 45 bp, Homo sapiens; identical to SEQ ID NO: 13604
  source 1..45: mol_type = genomic DNA

SEQ ID NO: 61516 - DNA, 37 bp, Homo sapiens; identical to SEQ ID NO: 7002
  source 1..37: mol_type = genomic DNA

SEQ ID NO: 61517 - DNA, 24 bp, Homo sapiens
  source 1..24: mol_type = genomic DNA
ataaggcatcagcctccggagctg

SEQ ID NO: 61518 - DNA, 28 bp, Homo sapiens
  source 1..28: mol_type = genomic DNA
ttgacccgggttcgattcccggccaacg

SEQ ID NO: 61519 - DNA, 21 bp, Homo sapiens
  source 1..21: mol_type = genomic DNA
aatggataaggcattggcctc

SEQ ID NO: 61520 - DNA, 30 bp, Homo sapiens; identical to SEQ ID NO: 2602
  source 1..30: mol_type = genomic DNA

SEQ ID NO: 61521 - DNA, 48 bp, Homo sapiens; identical to SEQ ID NO: 222
  source 1..48: mol_type = genomic DNA

SEQ ID NO: 61522 - DNA, 26 bp, Homo sapiens
  source 1..26: mol_type = genomic DNA
tctggtctccaatggaggcgtgggtt

SEQ ID NO: 61523 - DNA, 29 bp, Homo sapiens
  source 1..29: mol_type = genomic DNA
ttaacacaaagcacccaacttacacttag

SEQ ID NO: 61524 - DNA, 48 bp, Homo sapiens; identical to SEQ ID NO: 6485
  source 1..48: mol_type = genomic DNA

SEQ ID NO: 61525 - DNA, 42 bp, Homo sapiens; identical to SEQ ID NO: 23911
  source 1..42: mol_type = genomic DNA

SEQ ID NO: 61526 - DNA, 40 bp, Homo sapiens; identical to SEQ ID NO: 24376
  source 1..40: mol_type = genomic DNA

SEQ ID NO: 61527 - DNA, 28 bp, Homo sapiens
  source 1..28: mol_type = genomic DNA
taactcatgcccccatgtctaacaacat

SEQ ID NO: 61528 - DNA, 23 bp, Homo sapiens
  source 1..23: mol_type = genomic DNA
tctgaaggtcgtgagttcgagcc

SEQ ID NO: 61529 - DNA, 34 bp, Homo sapiens; identical to SEQ ID NO: 16531
  source 1..34: mol_type = genomic DNA

SEQ ID NO: 61530 - DNA, 37 bp, Homo sapiens; identical to SEQ ID NO: 5442
  source 1..37: mol_type = genomic DNA

SEQ ID NO: 61531 - DNA, 31 bp, Homo sapiens; identical to SEQ ID NO: 7367
  source 1..31: mol_type = genomic DNA

SEQ ID NO: 61532 - DNA, 28 bp, Homo sapiens
  source 1..28: mol_type = genomic DNA
ttggtggtgcagtggtagaattctcgcc

SEQ ID NO: 61533 - DNA, 39 bp, Homo sapiens; identical to SEQ ID NO: 10384
  source 1..39: mol_type = genomic DNA

SEQ ID NO: 61534 - DNA, 28 bp, Homo sapiens
  source 1..28: mol_type = genomic DNA
ttctcgcctgccacgcgggaggcccggg

SEQ ID NO: 61535 - DNA, 26 bp, Homo sapiens
  source 1..26: mol_type = genomic DNA
cgcgggagaccggggttcaattcccc

SEQ ID NO: 61536 - DNA, 34 bp, Homo sapiens; identical to SEQ ID NO: 4031
  source 1..34: mol_type = genomic DNA

SEQ ID NO: 61537 - DNA, 29 bp, Homo sapiens
  source 1..29: mol_type = genomic DNA
aaattttggtgcaactccaaataaaagta

SEQ ID NO: 61538 - DNA, 23 bp, Homo sapiens
  source 1..23: mol_type = genomic DNA
acacgcgaaaggtccccggttcg

SEQ ID NO: 61539 - DNA, 35 bp, Homo sapiens; identical to SEQ ID NO: 15948
  source 1..35: mol_type = genomic DNA

SEQ ID NO: 61540 - DNA, 42 bp, Homo sapiens; identical to SEQ ID NO: 28833
  source 1..42: mol_type = genomic DNA

SEQ ID NO: 61541 - DNA, 38 bp, Homo sapiens; identical to SEQ ID NO: 25440
  source 1..38: mol_type = genomic DNA

SEQ ID NO: 61542 - DNA, 27 bp, Homo sapiens
  source 1..27: mol_type = genomic DNA
ggtcgtgggttcgagccccacgttggg

SEQ ID NO: 61543 - DNA, 19 bp, Homo sapiens
  source 1..19: mol_type = genomic DNA
agcatgggactcttaatct

SEQ ID NO: 61544 - DNA, 38 bp, Homo sapiens; identical to SEQ ID NO: 29424
  source 1..38: mol_type = genomic DNA

SEQ ID NO: 61545 - DNA, 35 bp, Homo sapiens; identical to SEQ ID NO: 28765
  source 1..35: mol_type = genomic DNA

SEQ ID NO: 61546 - DNA, 23 bp, Homo sapiens
  source 1..23: mol_type = genomic DNA
acccaacttacacttaggagatt

SEQ ID NO: 61547 - DNA, 19 bp, Homo sapiens
  source 1..19: mol_type = genomic DNA
ccgcgcaggttcgaaccct

SEQ ID NO: 61548 - DNA, 38 bp, Homo sapiens; identical to SEQ ID NO: 3133
  source 1..38: mol_type = genomic DNA

SEQ ID NO: 61549 - DNA, 22 bp, Homo sapiens
  source 1..22: mol_type = genomic DNA
gggattagctcaaatggtagag

SEQ ID NO: 61550 - DNA, 22 bp, Homo sapiens
  source 1..22: mol_type = genomic DNA
cggtagagcatgagactcttaa

SEQ ID NO: 61551 - DNA, 30 bp, Homo sapiens; identical to SEQ ID NO: 7163
  source 1..30: mol_type = genomic DNA

SEQ ID NO: 61552 - DNA, 23 bp, Homo sapiens
  source 1..23: mol_type = genomic DNA
aatctgacaacagaggcttacga

SEQ ID NO: 61553 - DNA, 44 bp, Homo sapiens; identical to SEQ ID NO: 28348
  source 1..44: mol_type = genomic DNA

SEQ ID NO: 61554 - DNA, 31 bp, Homo sapiens; identical to SEQ ID NO: 15554
  source 1..31: mol_type = genomic DNA

SEQ ID NO: 61555 - DNA, 27 bp, Homo sapiens
  source 1..27: mol_type = genomic DNA
gcatgggactcttaatcccagggtcgt

SEQ ID NO: 61556 - DNA, 38 bp, Homo sapiens; identical to SEQ ID NO: 21189
  source 1..38: mol_type = genomic DNA

SEQ ID NO: 61557 - DNA, 20 bp, Homo sapiens
  source 1..20: mol_type = genomic DNA
catggggttggcttgaaacc

SEQ ID NO: 61558 - DNA, 31 bp, Homo sapiens; identical to SEQ ID NO: 30164
  source 1..31: mol_type = genomic DNA

SEQ ID NO: 61559 - DNA, 17 bp, Homo sapiens
  source 1..17: mol_type = genomic DNA
ctaaatcctatatatct

SEQ ID NO: 61560 - DNA, 40 bp, Homo sapiens; identical to SEQ ID NO: 19225
  source 1..40: mol_type = genomic DNA

SEQ ID NO: 61561 - DNA, 48 bp, Homo sapiens; identical to SEQ ID NO: 22238
  source 1..48: mol_type = genomic DNA

SEQ ID NO: 61562 - DNA, 29 bp, Homo sapiens
  source 1..29: mol_type = genomic DNA
gtgtagctcagtggtagagcatttgactg

SEQ ID NO: 61563 - DNA, 29 bp, Homo sapiens
  source 1..29: mol_type = genomic DNA
taagtgtttgtgggtttaagtcccattgg

SEQ ID NO: 61564 - DNA, 19 bp, Homo sapiens
  source 1..19: mol_type = genomic DNA
ttccgtagtgtagtggtca

SEQ ID NO: 61565 - DNA, 37 bp, Homo sapiens; identical to SEQ ID NO: 4532
  source 1..37: mol_type = genomic DNA

SEQ ID NO: 61566 - DNA, 19 bp, Homo sapiens
  source 1..19: mol_type = genomic DNA
atgcccccatgtctaacaa

SEQ ID NO: 61567 - DNA, 30 bp, Homo sapiens; identical to SEQ ID NO: 30248
  source 1..30: mol_type = genomic DNA

SEQ ID NO: 61568 - DNA, 48 bp, Homo sapiens; identical to SEQ ID NO: 4219
  source 1..48: mol_type = genomic DNA

SEQ ID NO: 61569 - DNA, 27 bp, Homo sapiens
  source 1..27: mol_type = genomic DNA
tagtggtgagtatccccgcctgtcacg

SEQ ID NO: 61570 - DNA, 37 bp, Homo sapiens; identical to SEQ ID NO: 2339
  source 1..37: mol_type = genomic DNA

SEQ ID NO: 61571 - DNA, 30 bp, Homo sapiens; identical to SEQ ID NO: 29165
  source 1..30: mol_type = genomic DNA

SEQ ID NO: 61572 - DNA, 24 bp, Homo sapiens
  source 1..24: mol_type = genomic DNA
tcggtagagcatgagacccttaat

SEQ ID NO: 61573 - DNA, 46 bp, Homo sapiens; identical to SEQ ID NO: 1288
  source 1..46: mol_type = genomic DNA

SEQ ID NO: 61574 - DNA, 33 bp, Homo sapiens; identical to SEQ ID NO: 29376
  source 1..33: mol_type = genomic DNA

SEQ ID NO: 61575 - DNA, 19 bp, Homo sapiens
  source 1..19: mol_type = genomic DNA
tggttaggattcagcgctc

SEQ ID NO: 61576 - DNA, 21 bp, Homo sapiens
  source 1..21: mol_type = genomic DNA
attgtgctctgcacgcgtggg

SEQ ID NO: 61577 - DNA, 32 bp, Homo sapiens; identical to SEQ ID NO: 21969
  source 1..32: mol_type = genomic DNA

SEQ ID NO: 61578 - DNA, 23 bp, Homo sapiens
  source 1..23: mol_type = genomic DNA
atcatgcaagattcccattcttg

SEQ ID NO: 61579 - DNA, 21 bp, Homo sapiens
  source 1..21: mol_type = genomic DNA
tcgaaaccgagcggaaacacc

SEQ ID NO: 61580 - DNA, 33 bp, Homo sapiens; identical to SEQ ID NO: 21970
  source 1..33: mol_type = genomic DNA

SEQ ID NO: 61581 - DNA, 16 bp, Homo sapiens
  source 1..16: mol_type = genomic DNA
cgatccccggcacctc

SEQ ID NO: 61582 - DNA, 37 bp, Homo sapiens; identical to SEQ ID NO: 26889
  source 1..37: mol_type = genomic DNA

SEQ ID NO: 61583 - DNA, 32 bp, Homo sapiens; identical to SEQ ID NO: 4478
  source 1..32: mol_type = genomic DNA

SEQ ID NO: 61584 - DNA, 48 bp, Homo sapiens; identical to SEQ ID NO: 23932
  source 1..48: mol_type = genomic DNA

SEQ ID NO: 61585 - DNA, 42 bp, Homo sapiens; identical to SEQ ID NO: 13903
  source 1..42: mol_type = genomic DNA

SEQ ID NO: 61586 - DNA, 29 bp, Homo sapiens
  source 1..29: mol_type = genomic DNA
gtcggtagagcatcagacttttaatctga

SEQ ID NO: 61587 - DNA, 16 bp, Homo sapiens
  source 1..16: mol_type = genomic DNA
gtatatagtttaaaca

SEQ ID NO: 61588 - DNA, 47 bp, Homo sapiens; identical to SEQ ID NO: 12122
  source 1..47: mol_type = genomic DNA

SEQ ID NO: 61589 - DNA, 34 bp, Homo sapiens; identical to SEQ ID NO: 9955
  source 1..34: mol_type = genomic DNA

SEQ ID NO: 61590 - DNA, 20 bp, Homo sapiens
  source 1..20: mol_type = genomic DNA
aaccaacacctctttacagt

SEQ ID NO: 61591 - DNA, 35 bp, Homo sapiens; identical to SEQ ID NO: 5634
  source 1..35: mol_type = genomic DNA

SEQ ID NO: 61592 - DNA, 31 bp, Homo sapiens; identical to SEQ ID NO: 20239
  source 1..31: mol_type = genomic DNA

SEQ ID NO: 61593 - DNA, 41 bp, Homo sapiens; identical to SEQ ID NO: 9223
  source 1..41: mol_type = genomic DNA

SEQ ID NO: 61594 - DNA, 40 bp, Homo sapiens; identical to SEQ ID NO: 7572
  source 1..40: mol_type = genomic DNA

SEQ ID NO: 61595 - DNA, 33 bp, Homo sapiens; identical to SEQ ID NO: 16615
  source 1..33: mol_type = genomic DNA

SEQ ID NO: 61596 - DNA, 31 bp, Homo sapiens; identical to SEQ ID NO: 3910
  source 1..31: mol_type = genomic DNA

SEQ ID NO: 61597 - DNA, 37 bp, Homo sapiens; identical to SEQ ID NO: 20207
  source 1..37: mol_type = genomic DNA

SEQ ID NO: 61598 - DNA, 18 bp, Homo sapiens
  source 1..18: mol_type = genomic DNA
gataaggcgtctgattcc

SEQ ID NO: 61599 - DNA, 34 bp, Homo sapiens; identical to SEQ ID NO: 20605
  source 1..34: mol_type = genomic DNA

SEQ ID NO: 61600 - DNA, 21 bp, Homo sapiens
  source 1..21: mol_type = genomic DNA
tgtagtcgtggccgagtggtt

SEQ ID NO: 61601 - DNA, 28 bp, Homo sapiens
  source 1..28: mol_type = genomic DNA
tccagggttcaagtccctgttcaggcgc

SEQ ID NO: 61602 - DNA, 23 bp, Homo sapiens
  source 1..23: mol_type = genomic DNA
cccataccccgaaaatgttggtt

SEQ ID NO: 61603 - DNA, 34 bp, Homo sapiens; identical to SEQ ID NO: 14626
  source 1..34: mol_type = genomic DNA

SEQ ID NO: 61604 - DNA, 46 bp, Homo sapiens; identical to SEQ ID NO: 4662
  source 1..46: mol_type = genomic DNA

SEQ ID NO: 61605 - DNA, 29 bp, Homo sapiens
  source 1..29: mol_type = genomic DNA
gctctcaccgccgcggcccgggttcgatt

SEQ ID NO: 61606 - DNA, 21 bp, Homo sapiens
  source 1..21: mol_type = genomic DNA
cagtcggtggagcatgggact

SEQ ID NO: 61607 - DNA, 34 bp, Homo sapiens; identical to SEQ ID NO: 27286
  source 1..34: mol_type = genomic DNA

SEQ ID NO: 61608 - DNA, 27 bp, Homo sapiens
  source 1..27: mol_type = genomic DNA
gctttggggggttcgattccttccttt

SEQ ID NO: 61609 - DNA, 25 bp, Homo sapiens
  source 1..25: mol_type = genomic DNA
atatgtccgcgtgggttcgaacccc

SEQ ID NO: 61610 - DNA, 42 bp, Homo sapiens; identical to SEQ ID NO: 7007
  source 1..42: mol_type = genomic DNA

SEQ ID NO: 61611 - DNA, 45 bp, Homo sapiens; identical to SEQ ID NO: 17787
  source 1..45: mol_type = genomic DNA

SEQ ID NO: 61612 - DNA, 23 bp, Homo sapiens
  source 1..23: mol_type = genomic DNA
gttcgatcccgggcggaaacacc

SEQ ID NO: 61613 - DNA, 34 bp, Homo sapiens; identical to SEQ ID NO: 5987
  source 1..34: mol_type = genomic DNA

SEQ ID NO: 61614 - DNA, 34 bp, Homo sapiens; identical to SEQ ID NO: 1294
  source 1..34: mol_type = genomic DNA

SEQ ID NO: 61615 - DNA, 45 bp, Homo sapiens; identical to SEQ ID NO: 17471
  source 1..45: mol_type = genomic DNA

SEQ ID NO: 61616 - DNA, 32 bp, Homo sapiens; identical to SEQ ID NO: 12032
  source 1..32: mol_type = genomic DNA

SEQ ID NO: 61617 - DNA, 39 bp, Homo sapiens; identical to SEQ ID NO: 22579
  source 1..39: mol_type = genomic DNA

SEQ ID NO: 61618 - DNA, 32 bp, Homo sapiens; identical to SEQ ID NO: 7497
  source 1..32: mol_type = genomic DNA

SEQ ID NO: 61619 - DNA, 35 bp, Homo sapiens; identical to SEQ ID NO: 15592
  source 1..35: mol_type = genomic DNA

SEQ ID NO: 61620 - DNA, 23 bp, Homo sapiens
  source 1..23: mol_type = genomic DNA
ggttcgatccccgtactggccac

SEQ ID NO: 61621 - DNA, 31 bp, Homo sapiens; identical to SEQ ID NO: 5850
  source 1..31: mol_type = genomic DNA

SEQ ID NO: 61622 - DNA, 23 bp, Homo sapiens
  source 1..23: mol_type = genomic DNA
tcctggttttcacccaggcggcc

SEQ ID NO: 61623 - DNA, 48 bp, Homo sapiens; identical to SEQ ID NO: 29125
  source 1..48: mol_type = genomic DNA

SEQ ID NO: 61624 - DNA, 34 bp, Homo sapiens; identical to SEQ ID NO: 19171
  source 1..34: mol_type = genomic DNA

SEQ ID NO: 61625 - DNA, 26 bp, Homo sapiens
  source 1..26: mol_type = genomic DNA
tccctggttcaatcccgggtttcggc

SEQ ID NO: 61626 - DNA, 31 bp, Homo sapiens; identical to SEQ ID NO: 30657
  source 1..31: mol_type = genomic DNA

SEQ ID NO: 61627 - DNA, 18 bp, Homo sapiens
  source 1..18: mol_type = genomic DNA
cggttagcgcgcggtact

SEQ ID NO: 61628 - DNA, 32 bp, Homo sapiens; identical to SEQ ID NO: 6807
  source 1..32: mol_type = genomic DNA

SEQ ID NO: 61629 - DNA, 24 bp, Homo sapiens
  source 1..24: mol_type = genomic DNA
gatggatcgaaaccatcctctgct

SEQ ID NO: 61630 - DNA, 23 bp, Homo sapiens
  source 1..23: mol_type = genomic DNA
cgtagtgtagcggttatcacatt

SEQ ID NO: 61631 - DNA, 39 bp, Homo sapiens; identical to SEQ ID NO: 22499
  source 1..39: mol_type = genomic DNA

SEQ ID NO: 61632 - DNA, 31 bp, Homo sapiens; identical to SEQ ID NO: 9139
  source 1..31: mol_type = genomic DNA

SEQ ID NO: 61633 - DNA, 47 bp, Homo sapiens; identical to SEQ ID NO: 5468
  source 1..47: mol_type = genomic DNA

SEQ ID NO: 61634 - DNA, 35 bp, Homo sapiens; identical to SEQ ID NO: 21100
  source 1..35: mol_type = genomic DNA

SEQ ID NO: 61635 - DNA, 16 bp, Homo sapiens
  source 1..16: mol_type = genomic DNA
cagtgggtagagcatc

SEQ ID NO: 61636 - DNA, 46 bp, Homo sapiens; identical to SEQ ID NO: 18316
  source 1..46: mol_type = genomic DNA

SEQ ID NO: 61637 - DNA, 43 bp, Homo sapiens; identical to SEQ ID NO: 9545
  source 1..43: mol_type = genomic DNA

SEQ ID NO: 61638 - DNA, 38 bp, Homo sapiens; identical to SEQ ID NO: 9412
  source 1..38: mol_type = genomic DNA

SEQ ID NO: 61639 - DNA, 26 bp, Homo sapiens
  source 1..26: mol_type = genomic DNA
cagtcttgtaaaccggagatgaaaac

SEQ ID NO: 61640 - DNA, 40 bp, Homo sapiens; identical to SEQ ID NO: 15836
  source 1..40: mol_type = genomic DNA

SEQ ID NO: 61641 - DNA, 37 bp, Homo sapiens; identical to SEQ ID NO: 29501
  source 1..37: mol_type = genomic DNA

SEQ ID NO: 61642 - DNA, 28 bp, Homo sapiens
  source 1..28: mol_type = genomic DNA
cgcgtgggttcgaatcccatcctcgtcg

SEQ ID NO: 61643 - DNA, 45 bp, Homo sapiens; identical to SEQ ID NO: 17894
  source 1..45: mol_type = genomic DNA

SEQ ID NO: 61644 - DNA, 16 bp, Homo sapiens
  source 1..16: mol_type = genomic DNA
cgattcccggccaatg

SEQ ID NO: 61645 - DNA, 38 bp, Homo sapiens; identical to SEQ ID NO: 22498
  source 1..38: mol_type = genomic DNA

SEQ ID NO: 61646 - DNA, 48 bp, Homo sapiens; identical to SEQ ID NO: 10739
  source 1..48: mol_type = genomic DNA

SEQ ID NO: 61647 - DNA, 23 bp, Homo sapiens
  source 1..23: mol_type = genomic DNA
gcatcagcctccggagctgggga

SEQ ID NO: 61648 - DNA, 34 bp, Homo sapiens; identical to SEQ ID NO: 29593
  source 1..34: mol_type = genomic DNA

SEQ ID NO: 61649 - DNA, 45 bp, Homo sapiens; identical to SEQ ID NO: 14669
  source 1..45: mol_type = genomic DNA

SEQ ID NO: 61650 - DNA, 31 bp, Homo sapiens; identical to SEQ ID NO: 5282
  source 1..31: mol_type = genomic DNA

SEQ ID NO: 61651 - DNA, 32 bp, Homo sapiens; identical to SEQ ID NO: 6105
  source 1..32: mol_type = genomic DNA

SEQ ID NO: 61652 - DNA, 21 bp, Homo sapiens
  source 1..21: mol_type = genomic DNA
gggttcgattcccggccaacg

SEQ ID NO: 61653 - DNA, 40 bp, Homo sapiens; identical to SEQ ID NO: 27425
  source 1..40: mol_type = genomic DNA

SEQ ID NO: 61654 - DNA, 25 bp, Homo sapiens
  source 1..25: mol_type = genomic DNA
aaccgaagatcgcgggttcgaaccc

SEQ ID NO: 61655 - DNA, 42 bp, Homo sapiens; identical to SEQ ID NO: 13423
  source 1..42: mol_type = genomic DNA

SEQ ID NO: 61656 - DNA, 39 bp, Homo sapiens; identical to SEQ ID NO: 30044
  source 1..39: mol_type = genomic DNA

SEQ ID NO: 61657 - DNA, 48 bp, Homo sapiens; identical to SEQ ID NO: 13764
  source 1..48: mol_type = genomic DNA

SEQ ID NO: 61658 - DNA, 34 bp, Homo sapiens; identical to SEQ ID NO: 5896
  source 1..34: mol_type = genomic DNA

SEQ ID NO: 61659 - DNA, 27 bp, Homo sapiens
  source 1..27: mol_type = genomic DNA
tccgcgtgggttcgaaccccactcctg

SEQ ID NO: 61660 - DNA, 33 bp, Homo sapiens; identical to SEQ ID NO: 29187
  source 1..33: mol_type = genomic DNA

SEQ ID NO: 61661 - DNA, 28 bp, Homo sapiens
  source 1..28: mol_type = genomic DNA
agtcggtagagcatgagacccttaatct

SEQ ID NO: 61662 - DNA, 20 bp, Homo sapiens
  source 1..20: mol_type = genomic DNA
aatcgcataaaacttaaaac

SEQ ID NO: 61663 - DNA, 28 bp, Homo sapiens
  source 1..28: mol_type = genomic DNA
gtagcttacctcctcaaagcaatacact

SEQ ID NO: 61664 - DNA, 33 bp, Homo sapiens; identical to SEQ ID NO: 22951
  source 1..33: mol_type = genomic DNA

SEQ ID NO: 61665 - DNA, 29 bp, Homo sapiens
  source 1..29: mol_type = genomic DNA
ctagtggttaggattcggcgctctcaccg

SEQ ID NO: 61666 - DNA, 48 bp, Homo sapiens; identical to SEQ ID NO: 54722
  source 1..48: mol_type = genomic DNA

SEQ ID NO: 61667 - DNA, 46 bp, Homo sapiens; identical to SEQ ID NO: 1806
  source 1..46: mol_type = genomic DNA

SEQ ID NO: 61668 - DNA, 35 bp, Homo sapiens; identical to SEQ ID NO: 14948
  source 1..35: mol_type = genomic DNA

SEQ ID NO: 61669 - DNA, 21 bp, Homo sapiens
  source 1..21: mol_type = genomic DNA
tggaggcgtgggttcgaatcc

SEQ ID NO: 61670 - DNA, 33 bp, Homo sapiens; identical to SEQ ID NO: 27092
  source 1..33: mol_type = genomic DNA

SEQ ID NO: 61671 - DNA, 42 bp, Homo sapiens; identical to SEQ ID NO: 1549
  source 1..42: mol_type = genomic DNA

SEQ ID NO: 61672 - DNA, 30 bp, Homo sapiens; identical to SEQ ID NO: 20531
  source 1..30: mol_type = genomic DNA

SEQ ID NO: 61673 - DNA, 31 bp, Homo sapiens; identical to SEQ ID NO: 25141
  source 1..31: mol_type = genomic DNA

SEQ ID NO: 61674 - DNA, 37 bp, Homo sapiens; identical to SEQ ID NO: 6260
  source 1..37: mol_type = genomic DNA

SEQ ID NO: 61675 - DNA, 34 bp, Homo sapiens; identical to SEQ ID NO: 18222
  source 1..34: mol_type = genomic DNA

SEQ ID NO: 61676 - DNA, 36 bp, Homo sapiens; identical to SEQ ID NO: 23724
  source 1..36: mol_type = genomic DNA

SEQ ID NO: 61677 - DNA, 45 bp, Homo sapiens; identical to SEQ ID NO: 6255
  source 1..45: mol_type = genomic DNA

SEQ ID NO: 61678 - DNA, 34 bp, Homo sapiens; identical to SEQ ID NO: 8034
  source 1..34: mol_type = genomic DNA

SEQ ID NO: 61679 - DNA, 31 bp, Homo sapiens; identical to SEQ ID NO: 24959
  source 1..31: mol_type = genomic DNA

SEQ ID NO: 61680 - DNA, 35 bp, Homo sapiens; identical to SEQ ID NO: 23723
  source 1..35: mol_type = genomic DNA

SEQ ID NO: 61681 - DNA, 43 bp, Homo sapiens; identical to SEQ ID NO: 17571
  source 1..43: mol_type = genomic DNA

SEQ ID NO: 61682 - DNA, 42 bp, Homo sapiens; identical to SEQ ID NO: 17025
  source 1..42: mol_type = genomic DNA

SEQ ID NO: 61683 - DNA, 30 bp, Homo sapiens; identical to SEQ ID NO: 12003
  source 1..30: mol_type = genomic DNA

SEQ ID NO: 61684 - DNA, 34 bp, Homo sapiens; identical to SEQ ID NO: 10160
  source 1..34: mol_type = genomic DNA

SEQ ID NO: 61685 - DNA, 34 bp, Homo sapiens; identical to SEQ ID NO: 22638
  source 1..34: mol_type = genomic DNA

SEQ ID NO: 61686 - DNA, 39 bp, Homo sapiens; identical to SEQ ID NO: 13965
  source 1..39: mol_type = genomic DNA

SEQ ID NO: 61687 - DNA, 48 bp, Homo sapiens; identical to SEQ ID NO: 15008
  source 1..48: mol_type = genomic DNA

SEQ ID NO: 61688 - DNA, 26 bp, Homo sapiens
  source 1..26: mol_type = genomic DNA
tgaaaatgtttagacgggctcacatc

SEQ ID NO: 61689 - DNA, 37 bp, Homo sapiens; identical to SEQ ID NO: 6708
  source 1..37: mol_type = genomic DNA

SEQ ID NO: 61690 - DNA, 36 bp, Homo sapiens; identical to SEQ ID NO: 15231
  source 1..36: mol_type = genomic DNA

SEQ ID NO: 61691 - DNA, 24 bp, Homo sapiens
  source 1..24: mol_type = genomic DNA
tcgaagaagcagcttcaaacctgc

SEQ ID NO: 61692 - DNA, 22 bp, Homo sapiens
  source 1..22: mol_type = genomic DNA
ttcaatccccggcatctccacc

SEQ ID NO: 61693 - DNA, 43 bp, Homo sapiens; identical to SEQ ID NO: 5554
  source 1..43: mol_type = genomic DNA

SEQ ID NO: 61694 - DNA, 48 bp, Homo sapiens; identical to SEQ ID NO: 23915
  source 1..48: mol_type = genomic DNA

SEQ ID NO: 61695 - DNA, 46 bp, Homo sapiens; identical to SEQ ID NO: 21023
  source 1..46: mol_type = genomic DNA

SEQ ID NO: 61696 - DNA, 34 bp, Homo sapiens; identical to SEQ ID NO: 8959
  source 1..34: mol_type = genomic DNA

SEQ ID NO: 61697 - DNA, 46 bp, Homo sapiens; identical to SEQ ID NO: 26482
  source 1..46: mol_type = genomic DNA

SEQ ID NO: 61698 - DNA, 35 bp, Homo sapiens; identical to SEQ ID NO: 24531
  source 1..35: mol_type = genomic DNA

SEQ ID NO: 61699 - DNA, 32 bp, Homo sapiens; identical to SEQ ID NO: 21550
  source 1..32: mol_type = genomic DNA

SEQ ID NO: 61700 - DNA, 27 bp, Homo sapiens
  source 1..27: mol_type = genomic DNA
ttaggattcctggttttcacccaggtg

SEQ ID NO: 61701 - DNA, 48 bp, Homo sapiens; identical to SEQ ID NO: 14568
  source 1..48: mol_type = genomic DNA

SEQ ID NO: 61702 - DNA, 32 bp, Homo sapiens; identical to SEQ ID NO: 27480
  source 1..32: mol_type = genomic DNA

SEQ ID NO: 61703 - DNA, 48 bp, Homo sapiens; identical to SEQ ID NO: 23640
  source 1..48: mol_type = genomic DNA

SEQ ID NO: 61704 - DNA, 34 bp, Homo sapiens; identical to SEQ ID NO: 102
  source 1..34: mol_type = genomic DNA

SEQ ID NO: 61705 - DNA, 23 bp, Homo sapiens
  source 1..23: mol_type = genomic DNA
cttagcttaattaaagtggctga

SEQ ID NO: 61706 - DNA, 36 bp, Homo sapiens; identical to SEQ ID NO: 872
  source 1..36: mol_type = genomic DNA

SEQ ID NO: 61707 - DNA, 24 bp, Homo sapiens
  source 1..24: mol_type = genomic DNA
tagcgcgttcggctgttaaccgaa

SEQ ID NO: 61708 - DNA, 28 bp, Homo sapiens
  source 1..28: mol_type = genomic DNA
attggtggttcaatggtagaattctcgc

SEQ ID NO: 61709 - DNA, 25 bp, Homo sapiens
  source 1..25: mol_type = genomic DNA
cttacctcctcaaagcaatacactg

SEQ ID NO: 61710 - DNA, 48 bp, Homo sapiens; identical to SEQ ID NO: 3634
  source 1..48: mol_type = genomic DNA

SEQ ID NO: 61711 - DNA, 27 bp, Homo sapiens
  source 1..27: mol_type = genomic DNA
tttacagtcagaggttcaattcctctt

SEQ ID NO: 61712 - DNA, 24 bp, Homo sapiens
  source 1..24: mol_type = genomic DNA
tcgtaaaccgaagatcgcgggttc

SEQ ID NO: 61713 - DNA, 38 bp, Homo sapiens; identical to SEQ ID NO: 6307
  source 1..38: mol_type = genomic DNA

SEQ ID NO: 61714 - DNA, 22 bp, Homo sapiens
  source 1..22: mol_type = genomic DNA
gtggtagaattctcgcctccca

SEQ ID NO: 61715 - DNA, 23 bp, Homo sapiens
  source 1..23: mol_type = genomic DNA
gggctcacatcaccccataaaca

SEQ ID NO: 61716 - DNA, 33 bp, Homo sapiens; identical to SEQ ID NO: 27461
  source 1..33: mol_type = genomic DNA

SEQ ID NO: 61717 - DNA, 24 bp, Homo sapiens
  source 1..24: mol_type = genomic DNA
tgctttgcacgtatgaggccccgg

SEQ ID NO: 61718 - DNA, 17 bp, Homo sapiens
  source 1..17: mol_type = genomic DNA
aaccctgctcgctgcgc

SEQ ID NO: 61719 - DNA, 22 bp, Homo sapiens
  source 1..22: mol_type = genomic DNA
ccctcagtaagttgcaatactt

SEQ ID NO: 61720 - DNA, 45 bp, Homo sapiens; identical to SEQ ID NO: 27700
  source 1..45: mol_type = genomic DNA

SEQ ID NO: 61721 - DNA, 23 bp, Homo sapiens
  source 1..23: mol_type = genomic DNA
cgagttcaattctcgctggggcc

SEQ ID NO: 61722 - DNA, 17 bp, Homo sapiens
  source 1..17: mol_type = genomic DNA
cgatggatcgaaaccat

SEQ ID NO: 61723 - DNA, 18 bp, Homo sapiens
  source 1..18: mol_type = genomic DNA
cacgtatgaggccccggg

SEQ ID NO: 61724 - DNA, 48 bp, Homo sapiens; identical to SEQ ID NO: 30477
  source 1..48: mol_type = genomic DNA

SEQ ID NO: 61725 - DNA, 29 bp, Homo sapiens
  source 1..29: mol_type = genomic DNA
ccccatgtctaacaacatggctttctcac

SEQ ID NO: 61726 - DNA, 37 bp, Homo sapiens; identical to SEQ ID NO: 5912
  source 1..37: mol_type = genomic DNA

SEQ ID NO: 61727 - DNA, 35 bp, Homo sapiens; identical to SEQ ID NO: 16665
  source 1..35: mol_type = genomic DNA

SEQ ID NO: 61728 - DNA, 26 bp, Homo sapiens
  source 1..26: mol_type = genomic DNA
agtatagtggtgagtatccccgcctg

SEQ ID NO: 61729 - DNA, 30 bp, Homo sapiens; identical to SEQ ID NO: 27086
  source 1..30: mol_type = genomic DNA

SEQ ID NO: 61730 - DNA, 35 bp, Homo sapiens; identical to SEQ ID NO: 18945
  source 1..35: mol_type = genomic DNA

SEQ ID NO: 61731 - DNA, 17 bp, Homo sapiens
  source 1..17: mol_type = genomic DNA
agttgcaatacttaatt

SEQ ID NO: 61732 - DNA, 26 bp, Homo sapiens
  source 1..26: mol_type = genomic DNA
ttaaattataggctaaatcctatata

SEQ ID NO: 61733 - DNA, 20 bp, Homo sapiens
  source 1..20: mol_type = genomic DNA
caggggttagagcactggtc

SEQ ID NO: 61734 - DNA, 39 bp, Homo sapiens; identical to SEQ ID NO: 26664
  source 1..39: mol_type = genomic DNA

SEQ ID NO: 61735 - DNA, 48 bp, Homo sapiens; identical to SEQ ID NO: 29587
  source 1..48: mol_type = genomic DNA

SEQ ID NO: 61736 - DNA, 39 bp, Homo sapiens; identical to SEQ ID NO: 3889
  source 1..39: mol_type = genomic DNA

SEQ ID NO: 61737 - DNA, 35 bp, Homo sapiens; identical to SEQ ID NO: 2090
  source 1..35: mol_type = genomic DNA

SEQ ID NO: 61738 - DNA, 33 bp, Homo sapiens; identical to SEQ ID NO: 22883
  source 1..33: mol_type = genomic DNA

SEQ ID NO: 61739 - DNA, 23 bp, Homo sapiens
  source 1..23: mol_type = genomic DNA
ggtgattttcatattgaattgca

SEQ ID NO: 61740 - DNA, 20 bp, Homo sapiens
  source 1..20: mol_type = genomic DNA
tagggtgcttagctgttaac

SEQ ID NO: 61741 - DNA, 29 bp, Homo sapiens
  source 1..29: mol_type = genomic DNA
attctcgcctgccacgcgggaggcccggg

SEQ ID NO: 61742 - DNA, 17 bp, Homo sapiens
  source 1..17: mol_type = genomic DNA
gaagcagcttcaaacct

SEQ ID NO: 61743 - DNA, 28 bp, Homo sapiens
  source 1..28: mol_type = genomic DNA
tatagtttaaccaaaacatcagattgtg

SEQ ID NO: 61744 - DNA, 48 bp, Homo sapiens; identical to SEQ ID NO: 7509
  source 1..48: mol_type = genomic DNA

SEQ ID NO: 61745 - DNA, 36 bp, Homo sapiens; identical to SEQ ID NO: 22703
  source 1..36: mol_type = genomic DNA

SEQ ID NO: 61746 - DNA, 32 bp, Homo sapiens; identical to SEQ ID NO: 15595
  source 1..32: mol_type = genomic DNA

SEQ ID NO: 61747 - DNA, 48 bp, Homo sapiens; identical to SEQ ID NO: 16352
  source 1..48: mol_type = genomic DNA

SEQ ID NO: 61748 - DNA, 45 bp, Homo sapiens; identical to SEQ ID NO: 14698
  source 1..45: mol_type = genomic DNA

SEQ ID NO: 61749 - DNA, 34 bp, Homo sapiens; identical to SEQ ID NO: 4263
  source 1..34: mol_type = genomic DNA

SEQ ID NO: 61750 - DNA, 33 bp, Homo sapiens; identical to SEQ ID NO: 5283
  source 1..33: mol_type = genomic DNA

SEQ ID NO: 61751 - DNA, 48 bp, Homo sapiens; identical to SEQ ID NO: 16967
  source 1..48: mol_type = genomic DNA

SEQ ID NO: 61752 - DNA, 45 bp, Homo sapiens; identical to SEQ ID NO: 16116
  source 1..45: mol_type = genomic DNA

SEQ ID NO: 61753 - DNA, 23 bp, Homo sapiens
  source 1..23: mol_type = genomic DNA
taaaagagttactttgatagagt

SEQ ID NO: 61754 - DNA, 42 bp, Homo sapiens; identical to SEQ ID NO: 9812
  source 1..42: mol_type = genomic DNA

SEQ ID NO: 61755 - DNA, 27 bp, Homo sapiens
  source 1..27: mol_type = genomic DNA
atcgggcccataccccgaaaatgttgg

SEQ ID NO: 61756 - DNA, 23 bp, Homo sapiens
  source 1..23: mol_type = genomic DNA
gtgtgataggtggcacggagaat

SEQ ID NO: 61757 - DNA, 17 bp, Homo sapiens
  source 1..17: mol_type = genomic DNA
tctgcgttgtggccgca

SEQ ID NO: 61758 - DNA, 23 bp, Homo sapiens
  source 1..23: mol_type = genomic DNA
tagagccagactgcctgggtttg

SEQ ID NO: 61759 - DNA, 47 bp, Homo sapiens; identical to SEQ ID NO: 7468
  source 1..47: mol_type = genomic DNA

SEQ ID NO: 61760 - DNA, 36 bp, Homo sapiens; identical to SEQ ID NO: 26460
  source 1..36: mol_type = genomic DNA

SEQ ID NO: 61761 - DNA, 42 bp, Homo sapiens; identical to SEQ ID NO: 11530
  source 1..42: mol_type = genomic DNA

SEQ ID NO: 61762 - DNA, 26 bp, Homo sapiens
  source 1..26: mol_type = genomic DNA
agtaagttgcaatacttaatttctgc

SEQ ID NO: 61763 - DNA, 33 bp, Homo sapiens; identical to SEQ ID NO: 23615
  source 1..33: mol_type = genomic DNA

SEQ ID NO: 61764 - DNA, 46 bp, Homo sapiens; identical to SEQ ID NO: 12481
  source 1..46: mol_type = genomic DNA

SEQ ID NO: 61765 - DNA, 19 bp, Homo sapiens
  source 1..19: mol_type = genomic DNA
agcgcgctggacttctaat

SEQ ID NO: 61766 - DNA, 34 bp, Homo sapiens; identical to SEQ ID NO: 8594
  source 1..34: mol_type = genomic DNA

SEQ ID NO: 61767 - DNA, 31 bp, Homo sapiens; identical to SEQ ID NO: 9056
  source 1..31: mol_type = genomic DNA

SEQ ID NO: 61768 - DNA, 48 bp, Homo sapiens; identical to SEQ ID NO: 545
  source 1..48: mol_type = genomic DNA

SEQ ID NO: 61769 - DNA, 20 bp, Homo sapiens
  source 1..20: mol_type = genomic DNA
aagagaaccaacacctcttt

SEQ ID NO: 61770 - DNA, 26 bp, Homo sapiens
  source 1..26: mol_type = genomic DNA
aggtggcccgggttcgactcccggta

SEQ ID NO: 61771 - DNA, 21 bp, Homo sapiens
  source 1..21: mol_type = genomic DNA
tttgatagagtaaataatagg

SEQ ID NO: 61772 - DNA, 24 bp, Homo sapiens
  source 1..24: mol_type = genomic DNA
aagacaggggttaggcctcttttt

SEQ ID NO: 61773 - DNA, 23 bp, Homo sapiens
  source 1..23: mol_type = genomic DNA
caatacactgaaaatgtttagac

SEQ ID NO: 61774 - DNA, 35 bp, Homo sapiens; identical to SEQ ID NO: 21947
  source 1..35: mol_type = genomic DNA

SEQ ID NO: 61775 - DNA, 43 bp, Homo sapiens; identical to SEQ ID NO: 19665
  source 1..43: mol_type = genomic DNA

SEQ ID NO: 61776 - DNA, 37 bp, Homo sapiens; identical to SEQ ID NO: 18958
  source 1..37: mol_type = genomic DNA

SEQ ID NO: 61777 - DNA, 27 bp, Homo sapiens
  source 1..27: mol_type = genomic DNA
tcggaggcgtgggttcgaatcccaccg

SEQ ID NO: 61778 - DNA, 32 bp, Homo sapiens; identical to SEQ ID NO: 15070
  source 1..32: mol_type = genomic DNA

SEQ ID NO: 61779 - DNA, 32 bp, Homo sapiens; identical to SEQ ID NO: 3260
  source 1..32: mol_type = genomic DNA

SEQ ID NO: 61780 - DNA, 31 bp, Homo sapiens; identical to SEQ ID NO: 971
  source 1..31: mol_type = genomic DNA

SEQ ID NO: 61781 - DNA, 25 bp, Homo sapiens
  source 1..25: mol_type = genomic DNA
attcgaagaagcagcttcaaacctg

SEQ ID NO: 61782 - DNA, 19 bp, Homo sapiens
  source 1..19: mol_type = genomic DNA
ttaaacccccttatttcta

SEQ ID NO: 61783 - DNA, 25 bp, Homo sapiens
  source 1..25: mol_type = genomic DNA
tttggtgcaactccaaataaaagta

SEQ ID NO: 61784 - DNA, 30 bp, Homo sapiens; identical to SEQ ID NO: 25724
  source 1..30: mol_type = genomic DNA

SEQ ID NO: 61785 - DNA, 41 bp, Homo sapiens; identical to SEQ ID NO: 29021
  source 1..41: mol_type = genomic DNA

SEQ ID NO: 61786 - DNA, 47 bp, Homo sapiens; identical to SEQ ID NO: 23813
  source 1..47: mol_type = genomic DNA

SEQ ID NO: 61787 - DNA, 43 bp, Homo sapiens; identical to SEQ ID NO: 26375
  source 1..43: mol_type = genomic DNA

SEQ ID NO: 61788 - DNA, 36 bp, Homo sapiens; identical to SEQ ID NO: 4392
  source 1..36: mol_type = genomic DNA

SEQ ID NO: 61789 - DNA, 36 bp, Homo sapiens; identical to SEQ ID NO: 6232
  source 1..36: mol_type = genomic DNA

SEQ ID NO: 61790 - DNA, 42 bp, Homo sapiens; identical to SEQ ID NO: 14887
  source 1..42: mol_type = genomic DNA

SEQ ID NO: 61791 - DNA, 48 bp, Homo sapiens; identical to SEQ ID NO: 15503
  source 1..48: mol_type = genomic DNA

SEQ ID NO: 61792 - DNA, 42 bp, Homo sapiens; identical to SEQ ID NO: 8203
  source 1..42: mol_type = genomic DNA

SEQ ID NO: 61793 - DNA, 31 bp, Homo sapiens; identical to SEQ ID NO: 18130
  source 1..31: mol_type = genomic DNA

SEQ ID NO: 61794 - DNA, 25 bp, Homo sapiens
  source 1..25: mol_type = genomic DNA
ctagttttgacaacattcaaaaaag

SEQ ID NO: 61795 - DNA, 37 bp, Homo sapiens; identical to SEQ ID NO: 14666
  source 1..37: mol_type = genomic DNA

SEQ ID NO: 61796 - DNA, 34 bp, Homo sapiens; identical to SEQ ID NO: 28697
  source 1..34: mol_type = genomic DNA

SEQ ID NO: 61797 - DNA, 40 bp, Homo sapiens; identical to SEQ ID NO: 30469
  source 1..40: mol_type = genomic DNA

SEQ ID NO: 61798 - DNA, 48 bp, Homo sapiens; identical to SEQ ID NO: 22200
  source 1..48: mol_type = genomic DNA

SEQ ID NO: 61799 - DNA, 45 bp, Homo sapiens; identical to SEQ ID NO: 18494
  source 1..45: mol_type = genomic DNA

SEQ ID NO: 61800 - DNA, 25 bp, Homo sapiens
  source 1..25: mol_type = genomic DNA
tggtggagttaaagactttttctct

SEQ ID NO: 61801 - DNA, 40 bp, Homo sapiens; identical to SEQ ID NO: 3008
  source 1..40: mol_type = genomic DNA

SEQ ID NO: 61802 - DNA, 32 bp, Homo sapiens; identical to SEQ ID NO: 17841
  source 1..32: mol_type = genomic DNA

SEQ ID NO: 61803 - DNA, 17 bp, Homo sapiens
  source 1..17: mol_type = genomic DNA
taacttagcattaacct

SEQ ID NO: 61804 - DNA, 28 bp, Homo sapiens
  source 1..28: mol_type = genomic DNA
aaaattttggtgcaactccaaataaaag

SEQ ID NO: 61805 - DNA, 30 bp, Homo sapiens; identical to SEQ ID NO: 29223
  source 1..30: mol_type = genomic DNA

SEQ ID NO: 61806 - DNA, 31 bp, Homo sapiens; identical to SEQ ID NO: 22870
  source 1..31: mol_type = genomic DNA

SEQ ID NO: 61807 - DNA, 19 bp, Homo sapiens
  source 1..19: mol_type = genomic DNA
gtcggtagagcataagact

SEQ ID NO: 61808 - DNA, 22 bp, Homo sapiens
  source 1..22: mol_type = genomic DNA
ttaaatacagaccaagagcctt

SEQ ID NO: 61809 - DNA, 36 bp, Homo sapiens; identical to SEQ ID NO: 11445
  source 1..36: mol_type = genomic DNA

SEQ ID NO: 61810 - DNA, 35 bp, Homo sapiens; identical to SEQ ID NO: 14192
  source 1..35: mol_type = genomic DNA

SEQ ID NO: 61811 - DNA, 37 bp, Homo sapiens; identical to SEQ ID NO: 18089
  source 1..37: mol_type = genomic DNA

SEQ ID NO: 61812 - DNA, 24 bp, Homo sapiens
  source 1..24: mol_type = genomic DNA
ttttgacaacattcaaaaaagagt

SEQ ID NO: 61813 - DNA, 20 bp, Homo sapiens
  source 1..20: mol_type = genomic DNA
ctccggatggaggcgtgggt

SEQ ID NO: 61814 - DNA, 40 bp, Homo sapiens; identical to SEQ ID NO: 29529
  source 1..40: mol_type = genomic DNA

SEQ ID NO: 61815 - DNA, 22 bp, Homo sapiens
  source 1..22: mol_type = genomic DNA
ttaaaactttacagtcagaggt

SEQ ID NO: 61816 - DNA, 48 bp, Homo sapiens; identical to SEQ ID NO: 19948
  source 1..48: mol_type = genomic DNA

SEQ ID NO: 61817 - DNA, 18 bp, Homo sapiens
  source 1..18: mol_type = genomic DNA
taaacccccttatttcta

SEQ ID NO: 61818 - DNA, 23 bp, Homo sapiens
  source 1..23: mol_type = genomic DNA
ttgacaacattcaaaaaagagta

SEQ ID NO: 61819 - DNA, 46 bp, Homo sapiens; identical to SEQ ID NO: 13307
  source 1..46: mol_type = genomic DNA

SEQ ID NO: 61820 - DNA, 41 bp, Homo sapiens; identical to SEQ ID NO: 9728
  source 1..41: mol_type = genomic DNA

SEQ ID NO: 61821 - DNA, 28 bp, Homo sapiens
  source 1..28: mol_type = genomic DNA
taaaggataacagctatccattggtctt

SEQ ID NO: 61822 - DNA, 32 bp, Homo sapiens; identical to SEQ ID NO: 9100
  source 1..32: mol_type = genomic DNA

SEQ ID NO: 61823 - DNA, 41 bp, Homo sapiens; identical to SEQ ID NO: 5988
  source 1..41: mol_type = genomic DNA

SEQ ID NO: 61824 - DNA, 45 bp, Homo sapiens; identical to SEQ ID NO: 7577
  source 1..45: mol_type = genomic DNA

SEQ ID NO: 61825 - DNA, 34 bp, Homo sapiens; identical to SEQ ID NO: 25596
  source 1..34: mol_type = genomic DNA

SEQ ID NO: 61826 - DNA, 42 bp, Homo sapiens; identical to SEQ ID NO: 7574
  source 1..42: mol_type = genomic DNA

SEQ ID NO: 61827 - DNA, 18 bp, Homo sapiens
  source 1..18: mol_type = genomic DNA
gggttcgattcccggtca

SEQ ID NO: 61828 - DNA, 19 bp, Homo sapiens
  source 1..19: mol_type = genomic DNA
aacaggagatcctgggttc

SEQ ID NO: 61829 - DNA, 39 bp, Homo sapiens; identical to SEQ ID NO: 26817
  source 1..39: mol_type = genomic DNA

SEQ ID NO: 61830 - DNA, 16 bp, Homo sapiens
  source 1..16: mol_type = genomic DNA
aaatctcgctggggcc

SEQ ID NO: 61831 - DNA, 27 bp, Homo sapiens
  source 1..27: mol_type = genomic DNA
gtgggttcgaatcccaccctcgtcgcc

SEQ ID NO: 61832 - DNA, 33 bp, Homo sapiens; identical to SEQ ID NO: 17370
  source 1..33: mol_type = genomic DNA

SEQ ID NO: 61833 - DNA, 22 bp, Homo sapiens
  source 1..22: mol_type = genomic DNA
ccaggcggcccgggttcgactc

SEQ ID NO: 61834 - DNA, 40 bp, Homo sapiens; identical to SEQ ID NO: 1013
  source 1..40: mol_type = genomic DNA

SEQ ID NO: 61835 - DNA, 34 bp, Homo sapiens; identical to SEQ ID NO: 8814
  source 1..34: mol_type = genomic DNA

SEQ ID NO: 61836 - DNA, 36 bp, Homo sapiens; identical to SEQ ID NO: 9965
  source 1..36: mol_type = genomic DNA

SEQ ID NO: 61837 - DNA, 18 bp, Homo sapiens
  source 1..18: mol_type = genomic DNA
cgagtctcggtggaacct

SEQ ID NO: 61838 - DNA, 36 bp, Homo sapiens; identical to SEQ ID NO: 29494
  source 1..36: mol_type = genomic DNA

SEQ ID NO: 61839 - DNA, 39 bp, Homo sapiens; identical to SEQ ID NO: 30976
  source 1..39: mol_type = genomic DNA

SEQ ID NO: 61840 - DNA, 28 bp, Homo sapiens
  source 1..28: mol_type = genomic DNA
agggtcgtgggttcgagccccacgttgg

SEQ ID NO: 61841 - DNA, 48 bp, Homo sapiens; identical to SEQ ID NO: 7748
  source 1..48: mol_type = genomic DNA

SEQ ID NO: 61842 - DNA, 39 bp, Homo sapiens; identical to SEQ ID NO: 29309
  source 1..39: mol_type = genomic DNA

SEQ ID NO: 61843 - DNA, 37 bp, Homo sapiens; identical to SEQ ID NO: 6062
  source 1..37: mol_type = genomic DNA

SEQ ID NO: 61844 - DNA, 44 bp, Homo sapiens; identical to SEQ ID NO: 4242
  source 1..44: mol_type = genomic DNA

SEQ ID NO: 61845 - DNA, 23 bp, Homo sapiens
  source 1..23: mol_type = genomic DNA
gattttcatattgaattgcaaat

SEQ ID NO: 61846 - DNA, 48 bp, Homo sapiens; identical to SEQ ID NO: 30128
  source 1..48: mol_type = genomic DNA

SEQ ID NO: 61847 - DNA, 24 bp, Homo sapiens
  source 1..24: mol_type = genomic DNA
agaggcttacgaccccttatttac

SEQ ID NO: 61848 - DNA, 16 bp, Homo sapiens
  source 1..16: mol_type = genomic DNA
caagttctggtctcca

SEQ ID NO: 61849 - DNA, 44 bp, Homo sapiens; identical to SEQ ID NO: 733
  source 1..44: mol_type = genomic DNA

SEQ ID NO: 61850 - DNA, 31 bp, Homo sapiens; identical to SEQ ID NO: 672
  source 1..31: mol_type = genomic DNA

SEQ ID NO: 61851 - DNA, 28 bp, Homo sapiens
  source 1..28: mol_type = genomic DNA
tccgggttcgagtcccggcagagatgcc

SEQ ID NO: 61852 - DNA, 48 bp, Homo sapiens; identical to SEQ ID NO: 16576
  source 1..48: mol_type = genomic DNA

SEQ ID NO: 61853 - DNA, 31 bp, Homo sapiens; identical to SEQ ID NO: 9565
  source 1..31: mol_type = genomic DNA

SEQ ID NO: 61854 - DNA, 17 bp, Homo sapiens
  source 1..17: mol_type = genomic DNA
ccagtggcctaatggat

SEQ ID NO: 61855 - DNA, 22 bp, Homo sapiens
  source 1..22: mol_type = genomic DNA
taatcgcataaaacttaaaact

SEQ ID NO: 61856 - DNA, 37 bp, Homo sapiens; identical to SEQ ID NO: 31138
  source 1..37: mol_type = genomic DNA

SEQ ID NO: 61857 - DNA, 29 bp, Homo sapiens
  source 1..29: mol_type = genomic DNA
acgaggccccgggttcaatccccggcacc

SEQ ID NO: 61858 - DNA, 21 bp, Homo sapiens
  source 1..21: mol_type = genomic DNA
aaaatgttggttatacccttc

SEQ ID NO: 61859 - DNA, 30 bp, Homo sapiens; identical to SEQ ID NO: 24588
  source 1..30: mol_type = genomic DNA

SEQ ID NO: 61860 - DNA, 38 bp, Homo sapiens; identical to SEQ ID NO: 13731
  source 1..38: mol_type = genomic DNA

SEQ ID NO: 61861 - DNA, 35 bp, Homo sapiens; identical to SEQ ID NO: 28281
  source 1..35: mol_type = genomic DNA

SEQ ID NO: 61862 - DNA, 32 bp, Homo sapiens; identical to SEQ ID NO: 12369
  source 1..32: mol_type = genomic DNA

SEQ ID NO: 61863 - DNA, 23 bp, Homo sapiens
  source 1..23: mol_type = genomic DNA
aggttgtgagttcgagcctcacc

SEQ ID NO: 61864 - DNA, 37 bp, Homo sapiens; identical to SEQ ID NO: 25987
  source 1..37: mol_type = genomic DNA

SEQ ID NO: 61865 - DNA, 26 bp, Homo sapiens
  source 1..26: mol_type = genomic DNA
ttttgacaacattcaaaaaagagtac

SEQ ID NO: 61866 - DNA, 31 bp, Homo sapiens; identical to SEQ ID NO: 5252
  source 1..31: mol_type = genomic DNA

SEQ ID NO: 61867 - DNA, 24 bp, Homo sapiens
  source 1..24: mol_type = genomic DNA
ttggtgcaactccaaataaaagta

SEQ ID NO: 61868 - DNA, 32 bp, Homo sapiens; identical to SEQ ID NO: 26762
  source 1..32: mol_type = genomic DNA

SEQ ID NO: 61869 - DNA, 45 bp, Homo sapiens; identical to SEQ ID NO: 23511
  source 1..45: mol_type = genomic DNA

SEQ ID NO: 61870 - DNA, 27 bp, Homo sapiens
  source 1..27: mol_type = genomic DNA
gtgtagctcagtggtagagcgcgtgct

SEQ ID NO: 61871 - DNA, 16 bp, Homo sapiens
  source 1..16: mol_type = genomic DNA
ctccggatggaggcgt

SEQ ID NO: 61872 - DNA, 46 bp, Homo sapiens; identical to SEQ ID NO: 543
  source 1..46: mol_type = genomic DNA

SEQ ID NO: 61873 - DNA, 26 bp, Homo sapiens
  source 1..26: mol_type = genomic DNA
gatagctcagctggtagagcggagga

SEQ ID NO: 61874 - DNA, 29 bp, Homo sapiens
  source 1..29: mol_type = genomic DNA
gcactgtaaagctaacttagcattaacct

SEQ ID NO: 61875 - DNA, 31 bp, Homo sapiens; identical to SEQ ID NO: 31182
  source 1..31: mol_type = genomic DNA

SEQ ID NO: 61876 - DNA, 29 bp, Homo sapiens
  source 1..29: mol_type = genomic DNA
ttttggtgcaactccaaataaaagtacca

SEQ ID NO: 61877 - DNA, 28 bp, Homo sapiens
  source 1..28: mol_type = genomic DNA
ttttggtgcaactccaaataaaagtacc

SEQ ID NO: 61878 - DNA, 28 bp, Homo sapiens
  source 1..28: mol_type = genomic DNA
ttttgacaacattcaaaaaagagtacca

SEQ ID NO: 61879 - DNA, 17 bp, Homo sapiens
  source 1..17: mol_type = genomic DNA
ttttcatattgaattgc

SEQ ID NO: 61880 - DNA, 32 bp, Homo sapiens; identical to SEQ ID NO: 31106
  source 1..32: mol_type = genomic DNA

SEQ ID NO: 61881 - DNA, 27 bp, Homo sapiens
  source 1..27: mol_type = genomic DNA
ttttagtataaatagtaccgttaactt

SEQ ID NO: 61882 - DNA, 25 bp, Homo sapiens
  source 1..25: mol_type = genomic DNA
ttttagtataaatagtaccgttaac

SEQ ID NO: 61883 - DNA, 40 bp, Homo sapiens; identical to SEQ ID NO: 31088
  source 1..40: mol_type = genomic DNA

SEQ ID NO: 61884 - DNA, 28 bp, Homo sapiens
  source 1..28: mol_type = genomic DNA
ttttaaaggataacagctatccattggt

SEQ ID NO: 61885 - DNA, 17 bp, Homo sapiens
  source 1..17: mol_type = genomic DNA
ttttaaaggataacagc

SEQ ID NO: 61886 - DNA, 36 bp, Homo sapiens; identical to SEQ ID NO: 31038
  source 1..36: mol_type = genomic DNA

SEQ ID NO: 61887 - DNA, 27 bp, Homo sapiens
  source 1..27: mol_type = genomic DNA
tttggtgcaactccaaataaaagtacc

SEQ ID NO: 61888 - DNA, 19 bp, Homo sapiens
  source 1..19: mol_type = genomic DNA
tttggggggttcgattcct

SEQ ID NO: 61889 - DNA, 18 bp, Homo sapiens
  source 1..18: mol_type = genomic DNA
tttggggggttcgattcc

SEQ ID NO: 61890 - DNA, 42 bp, Homo sapiens; identical to SEQ ID NO: 30984
  source 1..42: mol_type = genomic DNA

SEQ ID NO: 61891 - DNA, 38 bp, Homo sapiens; identical to SEQ ID NO: 30981
  source 1..38: mol_type = genomic DNA

SEQ ID NO: 61892 - DNA, 35 bp, Homo sapiens; identical to SEQ ID NO: 30967
  source 1..35: mol_type = genomic DNA

SEQ ID NO: 61893 - DNA, 26 bp, Homo sapiens
  source 1..26: mol_type = genomic DNA
tttgatagagtaaataataggagctt

SEQ ID NO: 61894 - DNA, 19 bp, Homo sapiens
  source 1..19: mol_type = genomic DNA
tttcgactcattaaattat

SEQ ID NO: 61895 - DNA, 26 bp, Homo sapiens
  source 1..26: mol_type = genomic DNA
tttcatattgaattgcaaattcgaag

SEQ ID NO: 61896 - DNA, 18 bp, Homo sapiens
  source 1..18: mol_type = genomic DNA
tttaggttaaatacagac

SEQ ID NO: 61897 - DNA, 17 bp, Homo sapiens
  source 1..17: mol_type = genomic DNA
tttaagttaaagattaa

SEQ ID NO: 61898 - DNA, 36 bp, Homo sapiens; identical to SEQ ID NO: 30675
  source 1..36: mol_type = genomic DNA

SEQ ID NO: 61899 - DNA, 31 bp, Homo sapiens; identical to SEQ ID NO: 30648
  source 1..31: mol_type = genomic DNA

SEQ ID NO: 61900 - DNA, 30 bp, Homo sapiens; identical to SEQ ID NO: 30647
  source 1..30: mol_type = genomic DNA

SEQ ID NO: 61901 - DNA, 25 bp, Homo sapiens
  source 1..25: mol_type = genomic DNA
tttaaacaaaacgaatgatttcgac

SEQ ID NO: 61902 - DNA, 42 bp, Homo sapiens; identical to SEQ ID NO: 30607
  source 1..42: mol_type = genomic DNA

SEQ ID NO: 61903 - DNA, 34 bp, Homo sapiens; identical to SEQ ID NO: 30584
  source 1..34: mol_type = genomic DNA

SEQ ID NO: 61904 - DNA, 43 bp, Homo sapiens; identical to SEQ ID NO: 30552
  source 1..43: mol_type = genomic DNA

SEQ ID NO: 61905 - DNA, 26 bp, Homo sapiens
  source 1..26: mol_type = genomic DNA
ttggtggttcgatcccacccagggac

SEQ ID NO: 61906 - DNA, 48 bp, Homo sapiens; identical to SEQ ID NO: 30477
  source 1..48: mol_type = genomic DNA

SEQ ID NO: 61907 - DNA, 43 bp, Homo sapiens; identical to SEQ ID NO: 30472
  source 1..43: mol_type = genomic DNA

SEQ ID NO: 61908 - DNA, 39 bp, Homo sapiens; identical to SEQ ID NO: 30468
  source 1..39: mol_type = genomic DNA

SEQ ID NO: 61909 - DNA, 35 bp, Homo sapiens; identical to SEQ ID NO: 30464
  source 1..35: mol_type = genomic DNA

SEQ ID NO: 61910 - DNA, 29 bp, Homo sapiens
  source 1..29: mol_type = genomic DNA
ttggtggttcaatggtagaattctcgcct

SEQ ID NO: 61911 - DNA, 29 bp, Homo sapiens
  source 1..29: mol_type = genomic DNA
ttggtggtgcagtggtagaattctcgcct

SEQ ID NO: 61912 - DNA, 32 bp, Homo sapiens; identical to SEQ ID NO: 30424
  source 1..32: mol_type = genomic DNA

SEQ ID NO: 61913 - DNA, 20 bp, Homo sapiens
  source 1..20: mol_type = genomic DNA
ttggtgcaactccaaataaa

SEQ ID NO: 61914 - DNA, 23 bp, Homo sapiens
  source 1..23: mol_type = genomic DNA
ttggtctagtggtatgattctcg

SEQ ID NO: 61915 - DNA, 38 bp, Homo sapiens; identical to SEQ ID NO: 30362
  source 1..38: mol_type = genomic DNA

SEQ ID NO: 61916 - DNA, 39 bp, Homo sapiens; identical to SEQ ID NO: 30353
  source 1..39: mol_type = genomic DNA

SEQ ID NO: 61917 - DNA, 24 bp, Homo sapiens
  source 1..24: mol_type = genomic DNA
ttggggtttccccgcgcaggttcg

SEQ ID NO: 61918 - DNA, 28 bp, Homo sapiens
  source 1..28: mol_type = genomic DNA
ttggcctcctaagccagggattgtgggt

SEQ ID NO: 61919 - DNA, 43 bp, Homo sapiens; identical to SEQ ID NO: 30301
  source 1..43: mol_type = genomic DNA

SEQ ID NO: 61920 - DNA, 38 bp, Homo sapiens; identical to SEQ ID NO: 30291
  source 1..38: mol_type = genomic DNA

SEQ ID NO: 61921 - DNA, 19 bp, Homo sapiens
  source 1..19: mol_type = genomic DNA
ttgcaatacttaatttctg

SEQ ID NO: 61922 - DNA, 42 bp, Homo sapiens; identical to SEQ ID NO: 30238
  source 1..42: mol_type = genomic DNA

SEQ ID NO: 61923 - DNA, 42 bp, Homo sapiens; identical to SEQ ID NO: 30227
  source 1..42: mol_type = genomic DNA

SEQ ID NO: 61924 - DNA, 33 bp, Homo sapiens; identical to SEQ ID NO: 30192
  source 1..33: mol_type = genomic DNA

SEQ ID NO: 61925 - DNA, 32 bp, Homo sapiens; identical to SEQ ID NO: 30191
  source 1..32: mol_type = genomic DNA

SEQ ID NO: 61926 - DNA, 27 bp, Homo sapiens
  source 1..27: mol_type = genomic DNA
ttgagggttcgaatcccttcgtggttg

SEQ ID NO: 61927 - DNA, 48 bp, Homo sapiens; identical to SEQ ID NO: 30128
  source 1..48: mol_type = genomic DNA

SEQ ID NO: 61928 - DNA, 16 bp, Homo sapiens
  source 1..16: mol_type = genomic DNA
ttctgtagtgtagtgg

SEQ ID NO: 61929 - DNA, 36 bp, Homo sapiens; identical to SEQ ID NO: 30077
  source 1..36: mol_type = genomic DNA

SEQ ID NO: 61930 - DNA, 48 bp, Homo sapiens; identical to SEQ ID NO: 30047
  source 1..48: mol_type = genomic DNA

SEQ ID NO: 61931 - DNA, 16 bp, Homo sapiens
  source 1..16: mol_type = genomic DNA
ttcggcgctctcaccg

SEQ ID NO: 61932 - DNA, 24 bp, Homo sapiens
  source 1..24: mol_type = genomic DNA
ttcggatcagaagattgcaggttc

SEQ ID NO: 61933 - DNA, 23 bp, Homo sapiens
  source 1..23: mol_type = genomic DNA
ttcgactcattaaattatgataa

SEQ ID NO: 61934 - DNA, 17 bp, Homo sapiens
  source 1..17: mol_type = genomic DNA
ttcgaatcccagcgggg

SEQ ID NO: 61935 - DNA, 17 bp, Homo sapiens
  source 1..17: mol_type = genomic DNA
ttcgaatcccactcctg

SEQ ID NO: 61936 - DNA, 34 bp, Homo sapiens; identical to SEQ ID NO: 29843
  source 1..34: mol_type = genomic DNA

SEQ ID NO: 61937 - DNA, 40 bp, Homo sapiens; identical to SEQ ID NO: 29730
  source 1..40: mol_type = genomic DNA

SEQ ID NO: 61938 - DNA, 17 bp, Homo sapiens
  source 1..17: mol_type = genomic DNA
ttcccggccagggaacc

SEQ ID NO: 61939 - DNA, 21 bp, Homo sapiens
  source 1..21: mol_type = genomic DNA
ttccccgcgcaggttcgaatc

SEQ ID NO: 61940 - DNA, 37 bp, Homo sapiens; identical to SEQ ID NO: 29664
  source 1..37: mol_type = genomic DNA

SEQ ID NO: 61941 - DNA, 48 bp, Homo sapiens; identical to SEQ ID NO: 29587
  source 1..48: mol_type = genomic DNA

SEQ ID NO: 61942 - DNA, 34 bp, Homo sapiens; identical to SEQ ID NO: 29549
  source 1..34: mol_type = genomic DNA

SEQ ID NO: 61943 - DNA, 33 bp, Homo sapiens; identical to SEQ ID NO: 29526
  source 1..33: mol_type = genomic DNA

SEQ ID NO: 61944 - DNA, 16 bp, Homo sapiens
  source 1..16: mol_type = genomic DNA
ttcaaacctgccgggg

SEQ ID NO: 61945 - DNA, 25 bp, Homo sapiens
  source 1..25: mol_type = genomic DNA
ttatgtagcttacctcctcaaagca

SEQ ID NO: 61946 - DNA, 33 bp, Homo sapiens; identical to SEQ ID NO: 29393
  source 1..33: mol_type = genomic DNA

SEQ ID NO: 61947 - DNA, 33 bp, Homo sapiens; identical to SEQ ID NO: 29376
  source 1..33: mol_type = genomic DNA

SEQ ID NO: 61948 - DNA, 29 bp, Homo sapiens
  source 1..29: mol_type = genomic DNA
ttagtatagtggtgagtatccccgcctgt

SEQ ID NO: 61949 - DNA, 34 bp, Homo sapiens; identical to SEQ ID NO: 29346
  source 1..34: mol_type = genomic DNA

SEQ ID NO: 61950 - DNA, 33 bp, Homo sapiens; identical to SEQ ID NO: 29345
  source 1..33: mol_type = genomic DNA

SEQ ID NO: 61951 - DNA, 48 bp, Homo sapiens; identical to SEQ ID NO: 29337
  source 1..48: mol_type = genomic DNA

SEQ ID NO: 61952 - DNA, 48 bp, Homo sapiens; identical to SEQ ID NO: 29305
  source 1..48: mol_type = genomic DNA

SEQ ID NO: 61953 - DNA, 41 bp, Homo sapiens; identical to SEQ ID NO: 29274
  source 1..41: mol_type = genomic DNA

SEQ ID NO: 61954 - DNA, 32 bp, Homo sapiens; identical to SEQ ID NO: 29262
  source 1..32: mol_type = genomic DNA

SEQ ID NO: 61955 - DNA, 31 bp, Homo sapiens; identical to SEQ ID NO: 29261
  source 1..31: mol_type = genomic DNA

SEQ ID NO: 61956 - DNA, 23 bp, Homo sapiens
  source 1..23: mol_type = genomic DNA
ttaggagatttcaacttaacttg

SEQ ID NO: 61957 - DNA, 16 bp, Homo sapiens
  source 1..16: mol_type = genomic DNA
ttaggagatttcaact

SEQ ID NO: 61958 - DNA, 31 bp, Homo sapiens; identical to SEQ ID NO: 29237
  source 1..31: mol_type = genomic DNA

SEQ ID NO: 61959 - DNA, 26 bp, Homo sapiens
  source 1..26: mol_type = genomic DNA
ttagctttgggtgctaatggtggagt

SEQ ID NO: 61960 - DNA, 48 bp, Homo sapiens; identical to SEQ ID NO: 29231
  source 1..48: mol_type = genomic DNA

SEQ ID NO: 61961 - DNA, 25 bp, Homo sapiens
  source 1..25: mol_type = genomic DNA
ttagctgttaactaagtgtttgtgg

SEQ ID NO: 61962 - DNA, 16 bp, Homo sapiens
  source 1..16: mol_type = genomic DNA
ttagcgcagtaggtag

SEQ ID NO: 61963 - DNA, 33 bp, Homo sapiens; identical to SEQ ID NO: 29187
  source 1..33: mol_type = genomic DNA

SEQ ID NO: 61964 - DNA, 48 bp, Homo sapiens; identical to SEQ ID NO: 29125
  source 1..48: mol_type = genomic DNA

SEQ ID NO: 61965 - DNA, 36 bp, Homo sapiens; identical to SEQ ID NO: 29059
  source 1..36: mol_type = genomic DNA

SEQ ID NO: 61966 - DNA, 25 bp, Homo sapiens
  source 1..25: mol_type = genomic DNA
ttacacttaggagatttcaacttaa

SEQ ID NO: 61967 - DNA, 39 bp, Homo sapiens; identical to SEQ ID NO: 29037
  source 1..39: mol_type = genomic DNA

SEQ ID NO: 61968 - DNA, 16 bp, Homo sapiens
  source 1..16: mol_type = genomic DNA
ttaatctcagggtcgt

SEQ ID NO: 61969 - DNA, 19 bp, Homo sapiens
  source 1..19: mol_type = genomic DNA
ttaagttaaagattaagag

SEQ ID NO: 61970 - DNA, 28 bp, Homo sapiens
  source 1..28: mol_type = genomic DNA
ttaacttccaattaactagttttgacaa

SEQ ID NO: 61971 - DNA, 34 bp, Homo sapiens; identical to SEQ ID NO: 28918
  source 1..34: mol_type = genomic DNA

SEQ ID NO: 61972 - DNA, 32 bp, Homo sapiens; identical to SEQ ID NO: 28885
  source 1..32: mol_type = genomic DNA

SEQ ID NO: 61973 - DNA, 35 bp, Homo sapiens; identical to SEQ ID NO: 28871
  source 1..35: mol_type = genomic DNA

SEQ ID NO: 61974 - DNA, 48 bp, Homo sapiens; identical to SEQ ID NO: 28863
  source 1..48: mol_type = genomic DNA

SEQ ID NO: 61975 - DNA, 45 bp, Homo sapiens; identical to SEQ ID NO: 28860
  source 1..45: mol_type = genomic DNA

SEQ ID NO: 61976 - DNA, 36 bp, Homo sapiens; identical to SEQ ID NO: 28853
  source 1..36: mol_type = genomic DNA

SEQ ID NO: 61977 - DNA, 28 bp, Homo sapiens
  source 1..28: mol_type = genomic DNA
ttaaccaaaacatcagattgtgaatctg

SEQ ID NO: 61978 - DNA, 29 bp, Homo sapiens
  source 1..29: mol_type = genomic DNA
ttaacacaaagcacccaacttacacttag

SEQ ID NO: 61979 - DNA, 17 bp, Homo sapiens
  source 1..17: mol_type = genomic DNA
ttaaattatgataatca

SEQ ID NO: 61980 - DNA, 34 bp, Homo sapiens; identical to SEQ ID NO: 28804
  source 1..34: mol_type = genomic DNA

SEQ ID NO: 61981 - DNA, 36 bp, Homo sapiens; identical to SEQ ID NO: 28783
  source 1..36: mol_type = genomic DNA

SEQ ID NO: 61982 - DNA, 18 bp, Homo sapiens
  source 1..18: mol_type = genomic DNA
ttaaacccccttatttct

SEQ ID NO: 61983 - DNA, 25 bp, Homo sapiens
  source 1..25: mol_type = genomic DNA
ttaaaactttacagtcagaggttca

SEQ ID NO: 61984 - DNA, 34 bp, Homo sapiens; identical to SEQ ID NO: 28647
  source 1..34: mol_type = genomic DNA

SEQ ID NO: 61985 - DNA, 17 bp, Homo sapiens
  source 1..17: mol_type = genomic DNA
tgtggtctagtggttag

SEQ ID NO: 61986 - DNA, 26 bp, Homo sapiens
  source 1..26: mol_type = genomic DNA
tgtgggttcgagtcccacctggggtg

SEQ ID NO: 61987 - DNA, 23 bp, Homo sapiens
  source 1..23: mol_type = genomic DNA
tgtctcgtaaacaggagatcctg

SEQ ID NO: 61988 - DNA, 18 bp, Homo sapiens
  source 1..18: mol_type = genomic DNA
tgtctaacaacatggctt

SEQ ID NO: 61989 - DNA, 21 bp, Homo sapiens
  source 1..21: mol_type = genomic DNA
tgtccgcgtgggttcgaaccc

SEQ ID NO: 61990 - DNA, 33 bp, Homo sapiens; identical to SEQ ID NO: 28539
  source 1..33: mol_type = genomic DNA

SEQ ID NO: 61991 - DNA, 23 bp, Homo sapiens
  source 1..23: mol_type = genomic DNA
tgtagtggttatcatgttcgcct

SEQ ID NO: 61992 - DNA, 20 bp, Homo sapiens
  source 1..20: mol_type = genomic DNA
tgtagtggtcatcacgttcg

SEQ ID NO: 61993 - DNA, 40 bp, Homo sapiens; identical to SEQ ID NO: 28499
  source 1..40: mol_type = genomic DNA

SEQ ID NO: 61994 - DNA, 21 bp, Homo sapiens
  source 1..21: mol_type = genomic DNA
tgtagtcgtggccgagtggtt

SEQ ID NO: 61995 - DNA, 43 bp, Homo sapiens; identical to SEQ ID NO: 28443
  source 1..43: mol_type = genomic DNA

SEQ ID NO: 61996 - DNA, 27 bp, Homo sapiens
  source 1..27: mol_type = genomic DNA
tgtaaaccggagatgaaaacctttttc

SEQ ID NO: 61997 - DNA, 48 bp, Homo sapiens; identical to SEQ ID NO: 28392
  source 1..48: mol_type = genomic DNA

SEQ ID NO: 61998 - DNA, 16 bp, Homo sapiens
  source 1..16: mol_type = genomic DNA
tggttcgagcccaccc

SEQ ID NO: 61999 - DNA, 25 bp, Homo sapiens
  source 1..25: mol_type = genomic DNA
tggttcgaatccggctcggaggacc

SEQ ID NO: 62000 - DNA, 48 bp, Homo sapiens; identical to SEQ ID NO: 28350
  source 1..48: mol_type = genomic DNA

SEQ ID NO: 62001 - DNA, 44 bp, Homo sapiens; identical to SEQ ID NO: 28348
  source 1..44: mol_type = genomic DNA

SEQ ID NO: 62002 - DNA, 18 bp, Homo sapiens
  source 1..18: mol_type = genomic DNA
tggttatcacgtctgctt

SEQ ID NO: 62003 - DNA, 17 bp, Homo sapiens
  source 1..17: mol_type = genomic DNA
tggttaggattcagcgc

SEQ ID NO: 62004 - DNA, 34 bp, Homo sapiens; identical to SEQ ID NO: 28240
  source 1..34: mol_type = genomic DNA

SEQ ID NO: 62005 - DNA, 41 bp, Homo sapiens; identical to SEQ ID NO: 28215
  source 1..41: mol_type = genomic DNA

SEQ ID NO: 62006 - DNA, 25 bp, Homo sapiens
  source 1..25: mol_type = genomic DNA
tggtggagttaaagactttttctct

SEQ ID NO: 62007 - DNA, 20 bp, Homo sapiens
  source 1..20: mol_type = genomic DNA
tggtgcaactccaaataaaa

SEQ ID NO: 62008 - DNA, 28 bp, Homo sapiens
  source 1..28: mol_type = genomic DNA
tggtgagcactctggactctgaatccag

SEQ ID NO: 62009 - DNA, 44 bp, Homo sapiens; identical to SEQ ID NO: 28044
  source 1..44: mol_type = genomic DNA

SEQ ID NO: 62010 - DNA, 34 bp, Homo sapiens; identical to SEQ ID NO: 28007
  source 1..34: mol_type = genomic DNA

SEQ ID NO: 62011 - DNA, 40 bp, Homo sapiens; identical to SEQ ID NO: 27866
  source 1..40: mol_type = genomic DNA

SEQ ID NO: 62012 - DNA, 33 bp, Homo sapiens; identical to SEQ ID NO: 27833
  source 1..33: mol_type = genomic DNA

SEQ ID NO: 62013 - DNA, 32 bp, Homo sapiens; identical to SEQ ID NO: 27740
  source 1..32: mol_type = genomic DNA

SEQ ID NO: 62014 - DNA, 29 bp, Homo sapiens
  source 1..29: mol_type = genomic DNA
tggaggcgtgggttcgaatcccacttctg

SEQ ID NO: 62015 - DNA, 21 bp, Homo sapiens
  source 1..21: mol_type = genomic DNA
tggaggcgtgggttcgaatcc

SEQ ID NO: 62016 - DNA, 34 bp, Homo sapiens; identical to SEQ ID NO: 27658
  source 1..34: mol_type = genomic DNA

SEQ ID NO: 62017 - DNA, 28 bp, Homo sapiens
  source 1..28: mol_type = genomic DNA
tgctaatggtggagttaaagactttttc

SEQ ID NO: 62018 - DNA, 38 bp, Homo sapiens; identical to SEQ ID NO: 27623
  source 1..38: mol_type = genomic DNA

SEQ ID NO: 62019 - DNA, 17 bp, Homo sapiens
  source 1..17: mol_type = genomic DNA
tgatttcgactcattaa

SEQ ID NO: 62020 - DNA, 25 bp, Homo sapiens
  source 1..25: mol_type = genomic DNA
tgattagggtgcttagctgttaact

SEQ ID NO: 62021 - DNA, 20 bp, Homo sapiens
  source 1..20: mol_type = genomic DNA
tgattagggtgcttagctgt

SEQ ID NO: 62022 - DNA, 23 bp, Homo sapiens
  source 1..23: mol_type = genomic DNA
tgatagagtaaataataggagct

SEQ ID NO: 62023 - DNA, 16 bp, Homo sapiens
  source 1..16: mol_type = genomic DNA
tgatagagtaaataat

SEQ ID NO: 62024 - DNA, 33 bp, Homo sapiens; identical to SEQ ID NO: 27285
  source 1..33: mol_type = genomic DNA

SEQ ID NO: 62025 - DNA, 34 bp, Homo sapiens; identical to SEQ ID NO: 27243
  source 1..34: mol_type = genomic DNA

SEQ ID NO: 62026 - DNA, 46 bp, Homo sapiens; identical to SEQ ID NO: 27179
  source 1..46: mol_type = genomic DNA

SEQ ID NO: 62027 - DNA, 42 bp, Homo sapiens; identical to SEQ ID NO: 27175
  source 1..42: mol_type = genomic DNA

SEQ ID NO: 62028 - DNA, 26 bp, Homo sapiens
  source 1..26: mol_type = genomic DNA
tgaattgcaaattcgaagaagcagct

SEQ ID NO: 62029 - DNA, 33 bp, Homo sapiens; identical to SEQ ID NO: 27144
  source 1..33: mol_type = genomic DNA

SEQ ID NO: 62030 - DNA, 27 bp, Homo sapiens
  source 1..27: mol_type = genomic DNA
tgaatccagcgatccgagttcgagtct

SEQ ID NO: 62031 - DNA, 33 bp, Homo sapiens; identical to SEQ ID NO: 27100
  source 1..33: mol_type = genomic DNA

SEQ ID NO: 62032 - DNA, 21 bp, Homo sapiens
  source 1..21: mol_type = genomic DNA
tgaaggtcctgagttcgaacc

SEQ ID NO: 62033 - DNA, 35 bp, Homo sapiens; identical to SEQ ID NO: 27074
  source 1..35: mol_type = genomic DNA

SEQ ID NO: 62034 - DNA, 32 bp, Homo sapiens; identical to SEQ ID NO: 27073
  source 1..32: mol_type = genomic DNA

SEQ ID NO: 62035 - DNA, 28 bp, Homo sapiens
  source 1..28: mol_type = genomic DNA
tgaaaatgtttagacgggctcacatcac

SEQ ID NO: 62036 - DNA, 26 bp, Homo sapiens
  source 1..26: mol_type = genomic DNA
tgaaaatgtttagacgggctcacatc

SEQ ID NO: 62037 - DNA, 38 bp, Homo sapiens; identical to SEQ ID NO: 26974
  source 1..38: mol_type = genomic DNA

SEQ ID NO: 62038 - DNA, 35 bp, Homo sapiens; identical to SEQ ID NO: 26971
  source 1..35: mol_type = genomic DNA

SEQ ID NO: 62039 - DNA, 29 bp, Homo sapiens
  source 1..29: mol_type = genomic DNA
tcttaatctcagggtcgtgggttcgagcc

SEQ ID NO: 62040 - DNA, 24 bp, Homo sapiens
  source 1..24: mol_type = genomic DNA
tcttaatctcagggtcgtgggttc

SEQ ID NO: 62041 - DNA, 32 bp, Homo sapiens; identical to SEQ ID NO: 26849
  source 1..32: mol_type = genomic DNA

SEQ ID NO: 62042 - DNA, 40 bp, Homo sapiens; identical to SEQ ID NO: 26823
  source 1..40: mol_type = genomic DNA

SEQ ID NO: 62043 - DNA, 29 bp, Homo sapiens
  source 1..29: mol_type = genomic DNA
tctgaaggtcgtgagttcgagcctcacac

SEQ ID NO: 62044 - DNA, 28 bp, Homo sapiens
  source 1..28: mol_type = genomic DNA
tctgaaggtcgtgagttcgagcctcaca

SEQ ID NO: 62045 - DNA, 23 bp, Homo sapiens
  source 1..23: mol_type = genomic DNA
tctgaaggtcgtgagttcgagcc

SEQ ID NO: 62046 - DNA, 40 bp, Homo sapiens; identical to SEQ ID NO: 26752
  source 1..40: mol_type = genomic DNA

SEQ ID NO: 62047 - DNA, 21 bp, Homo sapiens
  source 1..21: mol_type = genomic DNA
tctcttcgggggcgtgggttc

SEQ ID NO: 62048 - DNA, 21 bp, Homo sapiens
  source 1..21: mol_type = genomic DNA
tctcataatctgaaggtcgtg

SEQ ID NO: 62049 - DNA, 35 bp, Homo sapiens; identical to SEQ ID NO: 26678
  source 1..35: mol_type = genomic DNA

SEQ ID NO: 62050 - DNA, 19 bp, Homo sapiens
  source 1..19: mol_type = genomic DNA
tctcagggatgggttcgat

SEQ ID NO: 62051 - DNA, 31 bp, Homo sapiens; identical to SEQ ID NO: 26658
  source 1..31: mol_type = genomic DNA

SEQ ID NO: 62052 - DNA, 31 bp, Homo sapiens; identical to SEQ ID NO: 26642
  source 1..31: mol_type = genomic DNA

SEQ ID NO: 62053 - DNA, 32 bp, Homo sapiens; identical to SEQ ID NO: 26624
  source 1..32: mol_type = genomic DNA

SEQ ID NO: 62054 - DNA, 30 bp, Homo sapiens; identical to SEQ ID NO: 26623
  source 1..30: mol_type = genomic DNA

SEQ ID NO: 62055 - DNA, 16 bp, Homo sapiens
  source 1..16: mol_type = genomic DNA
tctaggttcgactcct

SEQ ID NO: 62056 - DNA, 29 bp, Homo sapiens
  source 1..29: mol_type = genomic DNA
tctagcggttaggattcctggttttcacc

SEQ ID NO: 62057 - DNA, 29 bp, Homo sapiens
  source 1..29: mol_type = genomic DNA
tctaaagacaggggttaggcctcttttta

SEQ ID NO: 62058 - DNA, 19 bp, Homo sapiens
  source 1..19: mol_type = genomic DNA
tcgtaaaccgaagatcgcg

SEQ ID NO: 62059 - DNA, 23 bp, Homo sapiens
  source 1..23: mol_type = genomic DNA
tcggtagagcatgggactcttaa

SEQ ID NO: 62060 - DNA, 37 bp, Homo sapiens; identical to SEQ ID NO: 26409
  source 1..37: mol_type = genomic DNA

SEQ ID NO: 62061 - DNA, 34 bp, Homo sapiens; identical to SEQ ID NO: 26407
  source 1..34: mol_type = genomic DNA

SEQ ID NO: 62062 - DNA, 26 bp, Homo sapiens
  source 1..26: mol_type = genomic DNA
tcggtagagcatgagacccttaatct

SEQ ID NO: 62063 - DNA, 24 bp, Homo sapiens
  source 1..24: mol_type = genomic DNA
tcggtagagcatgagacccttaat

SEQ ID NO: 62064 - DNA, 20 bp, Homo sapiens
  source 1..20: mol_type = genomic DNA
tcggtagagcatgagaccct

SEQ ID NO: 62065 - DNA, 18 bp, Homo sapiens
  source 1..18: mol_type = genomic DNA
tcggtagagcatgagacc

SEQ ID NO: 62066 - DNA, 26 bp, Homo sapiens
  source 1..26: mol_type = genomic DNA
tcgggggcgtgggttcgaatcccacc

SEQ ID NO: 62067 - DNA, 47 bp, Homo sapiens; identical to SEQ ID NO: 26361
  source 1..47: mol_type = genomic DNA

SEQ ID NO: 62068 - DNA, 33 bp, Homo sapiens; identical to SEQ ID NO: 26359
  source 1..33: mol_type = genomic DNA

SEQ ID NO: 62069 - DNA, 20 bp, Homo sapiens
  source 1..20: mol_type = genomic DNA
tcgggcccataccccgaaaa

SEQ ID NO: 62070 - DNA, 17 bp, Homo sapiens
  source 1..17: mol_type = genomic DNA
tcggctgttaaccgaaa

SEQ ID NO: 62071 - DNA, 31 bp, Homo sapiens; identical to SEQ ID NO: 26321
  source 1..31: mol_type = genomic DNA

SEQ ID NO: 62072 - DNA, 26 bp, Homo sapiens
  source 1..26: mol_type = genomic DNA
tcgatggcgtgggttcgaatcccacc

SEQ ID NO: 62073 - DNA, 38 bp, Homo sapiens; identical to SEQ ID NO: 26121
  source 1..38: mol_type = genomic DNA

SEQ ID NO: 62074 - DNA, 16 bp, Homo sapiens
  source 1..16: mol_type = genomic DNA
tcgaacctcagagggg

SEQ ID NO: 62075 - DNA, 42 bp, Homo sapiens; identical to SEQ ID NO: 25918
  source 1..42: mol_type = genomic DNA

SEQ ID NO: 62076 - DNA, 40 bp, Homo sapiens; identical to SEQ ID NO: 25916
  source 1..40: mol_type = genomic DNA

SEQ ID NO: 62077 - DNA, 17 bp, Homo sapiens
  source 1..17: mol_type = genomic DNA
tcctcacacggggcacc

SEQ ID NO: 62078 - DNA, 40 bp, Homo sapiens; identical to SEQ ID NO: 25885
  source 1..40: mol_type = genomic DNA

SEQ ID NO: 62079 - DNA, 40 bp, Homo sapiens; identical to SEQ ID NO: 25854
  source 1..40: mol_type = genomic DNA

SEQ ID NO: 62080 - DNA, 17 bp, Homo sapiens
  source 1..17: mol_type = genomic DNA
tccggatcagaagattg

SEQ ID NO: 62081 - DNA, 34 bp, Homo sapiens; identical to SEQ ID NO: 25762
  source 1..34: mol_type = genomic DNA

SEQ ID NO: 62082 - DNA, 24 bp, Homo sapiens
  source 1..24: mol_type = genomic DNA
tccgaggtgattttcatattgaat

SEQ ID NO: 62083 - DNA, 21 bp, Homo sapiens
  source 1..21: mol_type = genomic DNA
tccgaggtgattttcatattg

SEQ ID NO: 62084 - DNA, 20 bp, Homo sapiens
  source 1..20: mol_type = genomic DNA
tccgaggtgattttcatatt

SEQ ID NO: 62085 - DNA, 16 bp, Homo sapiens
  source 1..16: mol_type = genomic DNA
tccgaggtgattttca

SEQ ID NO: 62086 - DNA, 16 bp, Homo sapiens
  source 1..16: mol_type = genomic DNA
tccctgttcaggcgcc

SEQ ID NO: 62087 - DNA, 27 bp, Homo sapiens
  source 1..27: mol_type = genomic DNA
tccctggttcaaatccgggtgccccct

SEQ ID NO: 62088 - DNA, 43 bp, Homo sapiens; identical to SEQ ID NO: 25713
  source 1..43: mol_type = genomic DNA

SEQ ID NO: 62089 - DNA, 40 bp, Homo sapiens; identical to SEQ ID NO: 25685
  source 1..40: mol_type = genomic DNA

SEQ ID NO: 62090 - DNA, 40 bp, Homo sapiens; identical to SEQ ID NO: 25616
  source 1..40: mol_type = genomic DNA

SEQ ID NO: 62091 - DNA, 40 bp, Homo sapiens; identical to SEQ ID NO: 25564
  source 1..40: mol_type = genomic DNA

SEQ ID NO: 62092 - DNA, 34 bp, Homo sapiens; identical to SEQ ID NO: 25408
  source 1..34: mol_type = genomic DNA

SEQ ID NO: 62093 - DNA, 24 bp, Homo sapiens
  source 1..24: mol_type = genomic DNA
tccaggttcgactcctggctggct

SEQ ID NO: 62094 - DNA, 21 bp, Homo sapiens
  source 1..21: mol_type = genomic DNA
tccaggttcgactcctggctg

SEQ ID NO: 62095 - DNA, 28 bp, Homo sapiens
  source 1..28: mol_type = genomic DNA
tccagggttcaagtccctgttcaggcgc

SEQ ID NO: 62096 - DNA, 36 bp, Homo sapiens; identical to SEQ ID NO: 25339
  source 1..36: mol_type = genomic DNA

SEQ ID NO: 62097 - DNA, 18 bp, Homo sapiens
  source 1..18: mol_type = genomic DNA
tccaagcagttgacccgg

SEQ ID NO: 62098 - DNA, 34 bp, Homo sapiens; identical to SEQ ID NO: 25300
  source 1..34: mol_type = genomic DNA

SEQ ID NO: 62099 - DNA, 25 bp, Homo sapiens
  source 1..25: mol_type = genomic DNA
tcataatctgaaggtcgtgagttcg

SEQ ID NO: 62100 - DNA, 38 bp, Homo sapiens; identical to SEQ ID NO: 25208
  source 1..38: mol_type = genomic DNA

SEQ ID NO: 62101 - DNA, 33 bp, Homo sapiens; identical to SEQ ID NO: 25200
  source 1..33: mol_type = genomic DNA

SEQ ID NO: 62102 - DNA, 36 bp, Homo sapiens; identical to SEQ ID NO: 25188
  source 1..36: mol_type = genomic DNA

SEQ ID NO: 62103 - DNA, 35 bp, Homo sapiens; identical to SEQ ID NO: 25187
  source 1..35: mol_type = genomic DNA

SEQ ID NO: 62104 - DNA, 28 bp, Homo sapiens
  source 1..28: mol_type = genomic DNA
tcagtggtagaattctcgcctgccacgc

SEQ ID NO: 62105 - DNA, 31 bp, Homo sapiens; identical to SEQ ID NO: 25127
  source 1..31: mol_type = genomic DNA

SEQ ID NO: 62106 - DNA, 39 bp, Homo sapiens; identical to SEQ ID NO: 25112
  source 1..39: mol_type = genomic DNA

SEQ ID NO: 62107 - DNA, 30 bp, Homo sapiens; identical to SEQ ID NO: 25109
  source 1..30: mol_type = genomic DNA

SEQ ID NO: 62108 - DNA, 25 bp, Homo sapiens
  source 1..25: mol_type = genomic DNA
tcagtcggtagagcatgagaccctt

SEQ ID NO: 62109 - DNA, 24 bp, Homo sapiens
  source 1..24: mol_type = genomic DNA
tcagtcggtagagcatgagaccct

SEQ ID NO: 62110 - DNA, 23 bp, Homo sapiens
  source 1..23: mol_type = genomic DNA
tcagtcggtagagcatgagaccc

SEQ ID NO: 62111 - DNA, 19 bp, Homo sapiens
  source 1..19: mol_type = genomic DNA
tcaggggtagagcatttga

SEQ ID NO: 62112 - DNA, 25 bp, Homo sapiens
  source 1..25: mol_type = genomic DNA
tcaggatggccgagtggtctaaggc

SEQ ID NO: 62113 - DNA, 27 bp, Homo sapiens
  source 1..27: mol_type = genomic DNA
tcagctaaataagctatcgggcccata

SEQ ID NO: 62114 - DNA, 21 bp, Homo sapiens
  source 1..21: mol_type = genomic DNA
tcagctaaataagctatcggg

SEQ ID NO: 62115 - DNA, 24 bp, Homo sapiens
  source 1..24: mol_type = genomic DNA
tcagattgtgaatctgacaacaga

SEQ ID NO: 62116 - DNA, 26 bp, Homo sapiens
  source 1..26: mol_type = genomic DNA
tcacacgcgaaaggtccccggttcga

SEQ ID NO: 62117 - DNA, 48 bp, Homo sapiens; identical to SEQ ID NO: 24785
  source 1..48: mol_type = genomic DNA

SEQ ID NO: 62118 - DNA, 18 bp, Homo sapiens
  source 1..18: mol_type = genomic DNA
tcaagaggtccctggttc

SEQ ID NO: 62119 - DNA, 38 bp, Homo sapiens; identical to SEQ ID NO: 24671
  source 1..38: mol_type = genomic DNA

SEQ ID NO: 62120 - DNA, 22 bp, Homo sapiens
  source 1..22: mol_type = genomic DNA
tcaaagttaaattataggctaa

SEQ ID NO: 62121 - DNA, 21 bp, Homo sapiens
  source 1..21: mol_type = genomic DNA
tcaaagttaaattataggcta

SEQ ID NO: 62122 - DNA, 32 bp, Homo sapiens; identical to SEQ ID NO: 24640
  source 1..32: mol_type = genomic DNA

SEQ ID NO: 62123 - DNA, 35 bp, Homo sapiens; identical to SEQ ID NO: 24626
  source 1..35: mol_type = genomic DNA

SEQ ID NO: 62124 - DNA, 48 bp, Homo sapiens; identical to SEQ ID NO: 24607
  source 1..48: mol_type = genomic DNA

SEQ ID NO: 62125 - DNA, 27 bp, Homo sapiens
  source 1..27: mol_type = genomic DNA
tatgtccgcgtgggttcgaaccccact

SEQ ID NO: 62126 - DNA, 34 bp, Homo sapiens; identical to SEQ ID NO: 24577
  source 1..34: mol_type = genomic DNA

SEQ ID NO: 62127 - DNA, 20 bp, Homo sapiens
  source 1..20: mol_type = genomic DNA
tatggtctagcggttaggat

SEQ ID NO: 62128 - DNA, 33 bp, Homo sapiens; identical to SEQ ID NO: 24519
  source 1..33: mol_type = genomic DNA

SEQ ID NO: 62129 - DNA, 32 bp, Homo sapiens; identical to SEQ ID NO: 24518
  source 1..32: mol_type = genomic DNA

SEQ ID NO: 62130 - DNA, 23 bp, Homo sapiens
  source 1..23: mol_type = genomic DNA
tatcgggcccataccccgaaaat

SEQ ID NO: 62131 - DNA, 22 bp, Homo sapiens
  source 1..22: mol_type = genomic DNA
tatcgggcccataccccgaaaa

SEQ ID NO: 62132 - DNA, 19 bp, Homo sapiens
  source 1..19: mol_type = genomic DNA
tatcgggcccataccccga

SEQ ID NO: 62133 - DNA, 18 bp, Homo sapiens
  source 1..18: mol_type = genomic DNA
tatcgggcccataccccg

SEQ ID NO: 62134 - DNA, 41 bp, Homo sapiens; identical to SEQ ID NO: 24497
  source 1..41: mol_type = genomic DNA

SEQ ID NO: 62135 - DNA, 28 bp, Homo sapiens
  source 1..28: mol_type = genomic DNA
tatagtttaaccaaaacatcagattgtg

SEQ ID NO: 62136 - DNA, 17 bp, Homo sapiens
  source 1..17: mol_type = genomic DNA
tatagtggttagtatcc

SEQ ID NO: 62137 - DNA, 26 bp, Homo sapiens
  source 1..26: mol_type = genomic DNA
tatagtggttagcatagctgccttcc

SEQ ID NO: 62138 - DNA, 16 bp, Homo sapiens
  source 1..16: mol_type = genomic DNA
tatagtggtgagtatc

SEQ ID NO: 62139 - DNA, 31 bp, Homo sapiens; identical to SEQ ID NO: 24360
  source 1..31: mol_type = genomic DNA

SEQ ID NO: 62140 - DNA, 41 bp, Homo sapiens; identical to SEQ ID NO: 24242
  source 1..41: mol_type = genomic DNA

SEQ ID NO: 62141 - DNA, 33 bp, Homo sapiens; identical to SEQ ID NO: 24144
  source 1..33: mol_type = genomic DNA

SEQ ID NO: 62142 - DNA, 25 bp, Homo sapiens
  source 1..25: mol_type = genomic DNA
taggtcgctggttcgattccggctc

SEQ ID NO: 62143 - DNA, 23 bp, Homo sapiens
  source 1..23: mol_type = genomic DNA
taggattcggcgctttcaccgcc

SEQ ID NO: 62144 - DNA, 19 bp, Homo sapiens
  source 1..19: mol_type = genomic DNA
taggattcggcgctttcac

SEQ ID NO: 62145 - DNA, 48 bp, Homo sapiens; identical to SEQ ID NO: 24088
  source 1..48: mol_type = genomic DNA

SEQ ID NO: 62146 - DNA, 37 bp, Homo sapiens; identical to SEQ ID NO: 24085
  source 1..37: mol_type = genomic DNA

SEQ ID NO: 62147 - DNA, 24 bp, Homo sapiens
  source 1..24: mol_type = genomic DNA
taggattcctggttttcacccagg

SEQ ID NO: 62148 - DNA, 18 bp, Homo sapiens
  source 1..18: mol_type = genomic DNA
taggagatttcaacttaa

SEQ ID NO: 62149 - DNA, 34 bp, Homo sapiens; identical to SEQ ID NO: 23987
  source 1..34: mol_type = genomic DNA

SEQ ID NO: 62150 - DNA, 30 bp, Homo sapiens; identical to SEQ ID NO: 23972
  source 1..30: mol_type = genomic DNA

SEQ ID NO: 62151 - DNA, 32 bp, Homo sapiens; identical to SEQ ID NO: 23969
  source 1..32: mol_type = genomic DNA

SEQ ID NO: 62152 - DNA, 41 bp, Homo sapiens; identical to SEQ ID NO: 23960
  source 1..41: mol_type = genomic DNA

SEQ ID NO: 62153 - DNA, 35 bp, Homo sapiens; identical to SEQ ID NO: 23957
  source 1..35: mol_type = genomic DNA

SEQ ID NO: 62154 - DNA, 27 bp, Homo sapiens
  source 1..27: mol_type = genomic DNA
tagctgttaactaagtgtttgtgggtt

SEQ ID NO: 62155 - DNA, 48 bp, Homo sapiens; identical to SEQ ID NO: 23932
  source 1..48: mol_type = genomic DNA

SEQ ID NO: 62156 - DNA, 42 bp, Homo sapiens; identical to SEQ ID NO: 23928
  source 1..42: mol_type = genomic DNA

SEQ ID NO: 62157 - DNA, 34 bp, Homo sapiens; identical to SEQ ID NO: 23927
  source 1..34: mol_type = genomic DNA

SEQ ID NO: 62158 - DNA, 48 bp, Homo sapiens; identical to SEQ ID NO: 23915
  source 1..48: mol_type = genomic DNA

SEQ ID NO: 62159 - DNA, 34 bp, Homo sapiens; identical to SEQ ID NO: 23910
  source 1..34: mol_type = genomic DNA

SEQ ID NO: 62160 - DNA, 27 bp, Homo sapiens
  source 1..27: mol_type = genomic DNA
tagctcagtcggtagagcatgagactc

SEQ ID NO: 62161 - DNA, 28 bp, Homo sapiens
  source 1..28: mol_type = genomic DNA
tagctcagtcggtagagcatgagaccct

SEQ ID NO: 62162 - DNA, 27 bp, Homo sapiens
  source 1..27: mol_type = genomic DNA
tagctcagtcggtagagcatgagaccc

SEQ ID NO: 62163 - DNA, 26 bp, Homo sapiens
  source 1..26: mol_type = genomic DNA
tagctcagtcggtagagcataagact

SEQ ID NO: 62164 - DNA, 25 bp, Homo sapiens
  source 1..25: mol_type = genomic DNA
tagctcagtcggtagagcataagac

SEQ ID NO: 62165 - DNA, 17 bp, Homo sapiens
  source 1..17: mol_type = genomic DNA
tagctcaggcggtagag

SEQ ID NO: 62166 - DNA, 36 bp, Homo sapiens; identical to SEQ ID NO: 23843
  source 1..36: mol_type = genomic DNA

SEQ ID NO: 62167 - DNA, 48 bp, Homo sapiens; identical to SEQ ID NO: 23772
  source 1..48: mol_type = genomic DNA

SEQ ID NO: 62168 - DNA, 39 bp, Homo sapiens; identical to SEQ ID NO: 23767
  source 1..39: mol_type = genomic DNA

SEQ ID NO: 62169 - DNA, 33 bp, Homo sapiens; identical to SEQ ID NO: 23722
  source 1..33: mol_type = genomic DNA

SEQ ID NO: 62170 - DNA, 32 bp, Homo sapiens; identical to SEQ ID NO: 23721
  source 1..32: mol_type = genomic DNA

SEQ ID NO: 62171 - DNA, 23 bp, Homo sapiens
  source 1..23: mol_type = genomic DNA
tagagcatgggactcttaatctc

SEQ ID NO: 62172 - DNA, 32 bp, Homo sapiens; identical to SEQ ID NO: 23710
  source 1..32: mol_type = genomic DNA

SEQ ID NO: 62173 - DNA, 34 bp, Homo sapiens; identical to SEQ ID NO: 23693
  source 1..34: mol_type = genomic DNA

SEQ ID NO: 62174 - DNA, 33 bp, Homo sapiens; identical to SEQ ID NO: 23692
  source 1..33: mol_type = genomic DNA

SEQ ID NO: 62175 - DNA, 32 bp, Homo sapiens; identical to SEQ ID NO: 23691
  source 1..32: mol_type = genomic DNA

SEQ ID NO: 62176 - DNA, 31 bp, Homo sapiens; identical to SEQ ID NO: 23653
  source 1..31: mol_type = genomic DNA

SEQ ID NO: 62177 - DNA, 25 bp, Homo sapiens
  source 1..25: mol_type = genomic DNA
tagaattctcgcctgccacgcggga

SEQ ID NO: 62178 - DNA, 48 bp, Homo sapiens; identical to SEQ ID NO: 23640
  source 1..48: mol_type = genomic DNA

SEQ ID NO: 62179 - DNA, 35 bp, Homo sapiens; identical to SEQ ID NO: 23584
  source 1..35: mol_type = genomic DNA

SEQ ID NO: 62180 - DNA, 20 bp, Homo sapiens
  source 1..20: mol_type = genomic DNA
taccccgaaaatgttggtta

SEQ ID NO: 62181 - DNA, 27 bp, Homo sapiens
  source 1..27: mol_type = genomic DNA
tacacttaggagatttcaacttaactt

SEQ ID NO: 62182 - DNA, 48 bp, Homo sapiens; identical to SEQ ID NO: 23495
  source 1..48: mol_type = genomic DNA

SEQ ID NO: 62183 - DNA, 33 bp, Homo sapiens; identical to SEQ ID NO: 23457
  source 1..33: mol_type = genomic DNA

SEQ ID NO: 62184 - DNA, 30 bp, Homo sapiens; identical to SEQ ID NO: 23456
  source 1..30: mol_type = genomic DNA

SEQ ID NO: 62185 - DNA, 26 bp, Homo sapiens
  source 1..26: mol_type = genomic DNA
taatggtggagttaaagactttttct

SEQ ID NO: 62186 - DNA, 37 bp, Homo sapiens; identical to SEQ ID NO: 23333
  source 1..37: mol_type = genomic DNA

SEQ ID NO: 62187 - DNA, 38 bp, Homo sapiens; identical to SEQ ID NO: 23332
  source 1..38: mol_type = genomic DNA

SEQ ID NO: 62188 - DNA, 24 bp, Homo sapiens
  source 1..24: mol_type = genomic DNA
taatcgcataaaacttaaaacttt

SEQ ID NO: 62189 - DNA, 20 bp, Homo sapiens
  source 1..20: mol_type = genomic DNA
taatccattgtgctctgcac

SEQ ID NO: 62190 - DNA, 41 bp, Homo sapiens; identical to SEQ ID NO: 23279
  source 1..41: mol_type = genomic DNA

SEQ ID NO: 62191 - DNA, 26 bp, Homo sapiens
  source 1..26: mol_type = genomic DNA
taagttaaagattaagagaaccaaca

SEQ ID NO: 62192 - DNA, 48 bp, Homo sapiens; identical to SEQ ID NO: 23238
  source 1..48: mol_type = genomic DNA

SEQ ID NO: 62193 - DNA, 43 bp, Homo sapiens; identical to SEQ ID NO: 23235
  source 1..43: mol_type = genomic DNA

SEQ ID NO: 62194 - DNA, 27 bp, Homo sapiens
  source 1..27: mol_type = genomic DNA
taaggtcagctaaataagctatcgggc

SEQ ID NO: 62195 - DNA, 24 bp, Homo sapiens
  source 1..24: mol_type = genomic DNA
taaggtcagctaaataagctatcg

SEQ ID NO: 62196 - DNA, 17 bp, Homo sapiens
  source 1..17: mol_type = genomic DNA
taaggtcagctaaataa

SEQ ID NO: 62197 - DNA, 37 bp, Homo sapiens; identical to SEQ ID NO: 23202
  source 1..37: mol_type = genomic DNA

SEQ ID NO: 62198 - DNA, 19 bp, Homo sapiens
  source 1..19: mol_type = genomic DNA
taagctatcgggcccatac

SEQ ID NO: 62199 - DNA, 23 bp, Homo sapiens
  source 1..23: mol_type = genomic DNA
taagagaaccaacacctctttac

SEQ ID NO: 62200 - DNA, 30 bp, Homo sapiens; identical to SEQ ID NO: 23107
  source 1..30: mol_type = genomic DNA

SEQ ID NO: 62201 - DNA, 40 bp, Homo sapiens; identical to SEQ ID NO: 23044
  source 1..40: mol_type = genomic DNA

SEQ ID NO: 62202 - DNA, 38 bp, Homo sapiens; identical to SEQ ID NO: 23042
  source 1..38: mol_type = genomic DNA

SEQ ID NO: 62203 - DNA, 35 bp, Homo sapiens; identical to SEQ ID NO: 23040
  source 1..35: mol_type = genomic DNA

SEQ ID NO: 62204 - DNA, 31 bp, Homo sapiens; identical to SEQ ID NO: 23039
  source 1..31: mol_type = genomic DNA

SEQ ID NO: 62205 - DNA, 18 bp, Homo sapiens
  source 1..18: mol_type = genomic DNA
taactaagtgtttgtggg

SEQ ID NO: 62206 - DNA, 34 bp, Homo sapiens; identical to SEQ ID NO: 23030
  source 1..34: mol_type = genomic DNA

SEQ ID NO: 62207 - DNA, 48 bp, Homo sapiens; identical to SEQ ID NO: 23010
  source 1..48: mol_type = genomic DNA

SEQ ID NO: 62208 - DNA, 29 bp, Homo sapiens
  source 1..29: mol_type = genomic DNA
taaccttttaagttaaagattaagagaac

SEQ ID NO: 62209 - DNA, 40 bp, Homo sapiens; identical to SEQ ID NO: 22974
  source 1..40: mol_type = genomic DNA

SEQ ID NO: 62210 - DNA, 36 bp, Homo sapiens; identical to SEQ ID NO: 22970
  source 1..36: mol_type = genomic DNA

SEQ ID NO: 62211 - DNA, 34 bp, Homo sapiens; identical to SEQ ID NO: 22968
  source 1..34: mol_type = genomic DNA

SEQ ID NO: 62212 - DNA, 29 bp, Homo sapiens
  source 1..29: mol_type = genomic DNA
taacagctatccattggtcttaggcccca

SEQ ID NO: 62213 - DNA, 46 bp, Homo sapiens; identical to SEQ ID NO: 22941
  source 1..46: mol_type = genomic DNA

SEQ ID NO: 62214 - DNA, 41 bp, Homo sapiens; identical to SEQ ID NO: 22936
  source 1..41: mol_type = genomic DNA

SEQ ID NO: 62215 - DNA, 35 bp, Homo sapiens; identical to SEQ ID NO: 22873
  source 1..35: mol_type = genomic DNA

SEQ ID NO: 62216 - DNA, 20 bp, Homo sapiens
  source 1..20: mol_type = genomic DNA
taaatagtaccgttaacttc

SEQ ID NO: 62217 - DNA, 19 bp, Homo sapiens
  source 1..19: mol_type = genomic DNA
taaataataggagcttaaa

SEQ ID NO: 62218 - DNA, 34 bp, Homo sapiens; identical to SEQ ID NO: 22823
  source 1..34: mol_type = genomic DNA

SEQ ID NO: 62219 - DNA, 27 bp, Homo sapiens
  source 1..27: mol_type = genomic DNA
taaaggataacagctatccattggtct

SEQ ID NO: 62220 - DNA, 16 bp, Homo sapiens
  source 1..16: mol_type = genomic DNA
taaagactttttctct

SEQ ID NO: 62221 - DNA, 25 bp, Homo sapiens
  source 1..25: mol_type = genomic DNA
taaagacaggggttaggcctctttt

SEQ ID NO: 62222 - DNA, 25 bp, Homo sapiens
  source 1..25: mol_type = genomic DNA
taaaccggagatgaaaacctttttc

SEQ ID NO: 62223 - DNA, 30 bp, Homo sapiens; identical to SEQ ID NO: 22648
  source 1..30: mol_type = genomic DNA

SEQ ID NO: 62224 - DNA, 36 bp, Homo sapiens; identical to SEQ ID NO: 22641
  source 1..36: mol_type = genomic DNA

SEQ ID NO: 62225 - DNA, 26 bp, Homo sapiens
  source 1..26: mol_type = genomic DNA
taaaacttaaaactttacagtcagag

SEQ ID NO: 62226 - DNA, 31 bp, Homo sapiens; identical to SEQ ID NO: 22605
  source 1..31: mol_type = genomic DNA

SEQ ID NO: 62227 - DNA, 39 bp, Homo sapiens; identical to SEQ ID NO: 22579
  source 1..39: mol_type = genomic DNA

SEQ ID NO: 62228 - DNA, 36 bp, Homo sapiens; identical to SEQ ID NO: 22576
  source 1..36: mol_type = genomic DNA

SEQ ID NO: 62229 - DNA, 32 bp, Homo sapiens; identical to SEQ ID NO: 22560
  source 1..32: mol_type = genomic DNA

SEQ ID NO: 62230 - DNA, 32 bp, Homo sapiens; identical to SEQ ID NO: 22556
  source 1..32: mol_type = genomic DNA

SEQ ID NO: 62231 - DNA, 44 bp, Homo sapiens; identical to SEQ ID NO: 22552
  source 1..44: mol_type = genomic DNA

SEQ ID NO: 62232 - DNA, 37 bp, Homo sapiens; identical to SEQ ID NO: 22497
  source 1..37: mol_type = genomic DNA

SEQ ID NO: 62233 - DNA, 37 bp, Homo sapiens; identical to SEQ ID NO: 22478
  source 1..37: mol_type = genomic DNA

SEQ ID NO: 62234 - DNA, 36 bp, Homo sapiens; identical to SEQ ID NO: 22407
  source 1..36: mol_type = genomic DNA

SEQ ID NO: 62235 - DNA, 30 bp, Homo sapiens; identical to SEQ ID NO: 22381
  source 1..30: mol_type = genomic DNA

SEQ ID NO: 62236 - DNA, 34 bp, Homo sapiens; identical to SEQ ID NO: 22333
  source 1..34: mol_type = genomic DNA

SEQ ID NO: 62237 - DNA, 32 bp, Homo sapiens; identical to SEQ ID NO: 22315
  source 1..32: mol_type = genomic DNA

SEQ ID NO: 62238 - DNA, 48 bp, Homo sapiens; identical to SEQ ID NO: 22254
  source 1..48: mol_type = genomic DNA

SEQ ID NO: 62239 - DNA, 40 bp, Homo sapiens; identical to SEQ ID NO: 22230
  source 1..40: mol_type = genomic DNA

SEQ ID NO: 62240 - DNA, 37 bp, Homo sapiens; identical to SEQ ID NO: 22227
  source 1..37: mol_type = genomic DNA

SEQ ID NO: 62241 - DNA, 32 bp, Homo sapiens; identical to SEQ ID NO: 22222
  source 1..32: mol_type = genomic DNA

SEQ ID NO: 62242 - DNA, 48 bp, Homo sapiens; identical to SEQ ID NO: 22200
  source 1..48: mol_type = genomic DNA

SEQ ID NO: 62243 - DNA, 17 bp, Homo sapiens
  source 1..17: mol_type = genomic DNA
gttcgatccccgtacgg

SEQ ID NO: 62244 - DNA, 23 bp, Homo sapiens
  source 1..23: mol_type = genomic DNA
gttcgagtcccacctggggtgcc

SEQ ID NO: 62245 - DNA, 16 bp, Homo sapiens
  source 1..16: mol_type = genomic DNA
gttcgagcctcacctg

SEQ ID NO: 62246 - DNA, 44 bp, Homo sapiens; identical to SEQ ID NO: 22002
  source 1..44: mol_type = genomic DNA

SEQ ID NO: 62247 - DNA, 33 bp, Homo sapiens; identical to SEQ ID NO: 21998
  source 1..33: mol_type = genomic DNA

SEQ ID NO: 62248 - DNA, 36 bp, Homo sapiens; identical to SEQ ID NO: 21986
  source 1..36: mol_type = genomic DNA

SEQ ID NO: 62249 - DNA, 31 bp, Homo sapiens; identical to SEQ ID NO: 21968
  source 1..31: mol_type = genomic DNA

SEQ ID NO: 62250 - DNA, 34 bp, Homo sapiens; identical to SEQ ID NO: 21957
  source 1..34: mol_type = genomic DNA

SEQ ID NO: 62251 - DNA, 23 bp, Homo sapiens
  source 1..23: mol_type = genomic DNA
gttcaagtccctgttcaggcgcc

SEQ ID NO: 62252 - DNA, 19 bp, Homo sapiens
  source 1..19: mol_type = genomic DNA
gttatcacatctgctttac

SEQ ID NO: 62253 - DNA, 16 bp, Homo sapiens
  source 1..16: mol_type = genomic DNA
gttatcacatctgctt

SEQ ID NO: 62254 - DNA, 27 bp, Homo sapiens
  source 1..27: mol_type = genomic DNA
gttaacttccaattaactagttttgac

SEQ ID NO: 62255 - DNA, 43 bp, Homo sapiens; identical to SEQ ID NO: 21682
  source 1..43: mol_type = genomic DNA

SEQ ID NO: 62256 - DNA, 27 bp, Homo sapiens
  source 1..27: mol_type = genomic DNA
gtgtttgtgggtttaagtcccattggt

SEQ ID NO: 62257 - DNA, 45 bp, Homo sapiens; identical to SEQ ID NO: 21591
  source 1..45: mol_type = genomic DNA

SEQ ID NO: 62258 - DNA, 46 bp, Homo sapiens; identical to SEQ ID NO: 21546
  source 1..46: mol_type = genomic DNA

SEQ ID NO: 62259 - DNA, 40 bp, Homo sapiens; identical to SEQ ID NO: 21541
  source 1..40: mol_type = genomic DNA

SEQ ID NO: 62260 - DNA, 32 bp, Homo sapiens; identical to SEQ ID NO: 21510
  source 1..32: mol_type = genomic DNA

SEQ ID NO: 62261 - DNA, 44 bp, Homo sapiens; identical to SEQ ID NO: 21494
  source 1..44: mol_type = genomic DNA

SEQ ID NO: 62262 - DNA, 42 bp, Homo sapiens; identical to SEQ ID NO: 21493
  source 1..42: mol_type = genomic DNA

SEQ ID NO: 62263 - DNA, 19 bp, Homo sapiens
  source 1..19: mol_type = genomic DNA
gtggttatcacatctgctt

SEQ ID NO: 62264 - DNA, 37 bp, Homo sapiens; identical to SEQ ID NO: 21409
  source 1..37: mol_type = genomic DNA

SEQ ID NO: 62265 - DNA, 34 bp, Homo sapiens; identical to SEQ ID NO: 21406
  source 1..34: mol_type = genomic DNA

SEQ ID NO: 62266 - DNA, 40 bp, Homo sapiens; identical to SEQ ID NO: 21196
  source 1..40: mol_type = genomic DNA

SEQ ID NO: 62267 - DNA, 31 bp, Homo sapiens; identical to SEQ ID NO: 21193
  source 1..31: mol_type = genomic DNA

SEQ ID NO: 62268 - DNA, 34 bp, Homo sapiens; identical to SEQ ID NO: 21187
  source 1..34: mol_type = genomic DNA

SEQ ID NO: 62269 - DNA, 32 bp, Homo sapiens; identical to SEQ ID NO: 21185
  source 1..32: mol_type = genomic DNA

SEQ ID NO: 62270 - DNA, 31 bp, Homo sapiens; identical to SEQ ID NO: 21184
  source 1..31: mol_type = genomic DNA

SEQ ID NO: 62271 - DNA, 35 bp, Homo sapiens; identical to SEQ ID NO: 21110
  source 1..35: mol_type = genomic DNA

SEQ ID NO: 62272 - DNA, 28 bp, Homo sapiens
  source 1..28: mol_type = genomic DNA
gtgaatctgacaacagaggcttacgacc

SEQ ID NO: 62273 - DNA, 37 bp, Homo sapiens; identical to SEQ ID NO: 21043
  source 1..37: mol_type = genomic DNA

SEQ ID NO: 62274 - DNA, 16 bp, Homo sapiens
  source 1..16: mol_type = genomic DNA
gtctagtggctaggat

SEQ ID NO: 62275 - DNA, 18 bp, Homo sapiens
  source 1..18: mol_type = genomic DNA
gtcgtgggttcgagcccc

SEQ ID NO: 62276 - DNA, 17 bp, Homo sapiens
  source 1..17: mol_type = genomic DNA
gtcgtgggttcgagccc

SEQ ID NO: 62277 - DNA, 38 bp, Homo sapiens; identical to SEQ ID NO: 20914
  source 1..38: mol_type = genomic DNA

SEQ ID NO: 62278 - DNA, 37 bp, Homo sapiens; identical to SEQ ID NO: 20913
  source 1..37: mol_type = genomic DNA

SEQ ID NO: 62279 - DNA, 36 bp, Homo sapiens; identical to SEQ ID NO: 20912
  source 1..36: mol_type = genomic DNA

SEQ ID NO: 62280 - DNA, 29 bp, Homo sapiens
  source 1..29: mol_type = genomic DNA
gtcggtagagcatgggactcttaatccca

SEQ ID NO: 62281 - DNA, 39 bp, Homo sapiens; identical to SEQ ID NO: 20892
  source 1..39: mol_type = genomic DNA

SEQ ID NO: 62282 - DNA, 36 bp, Homo sapiens; identical to SEQ ID NO: 20889
  source 1..36: mol_type = genomic DNA

SEQ ID NO: 62283 - DNA, 29 bp, Homo sapiens
  source 1..29: mol_type = genomic DNA
gtcggtagagcatgagactcttaatctca

SEQ ID NO: 62284 - DNA, 27 bp, Homo sapiens
  source 1..27: mol_type = genomic DNA
gtcggtagagcatgagacccttaatct

SEQ ID NO: 62285 - DNA, 25 bp, Homo sapiens
  source 1..25: mol_type = genomic DNA
gtcggtagagcatgagacccttaat

SEQ ID NO: 62286 - DNA, 21 bp, Homo sapiens
  source 1..21: mol_type = genomic DNA
gtcggtagagcatgagaccct

SEQ ID NO: 62287 - DNA, 20 bp, Homo sapiens
  source 1..20: mol_type = genomic DNA
gtcggtagagcatgagaccc

SEQ ID NO: 62288 - DNA, 19 bp, Homo sapiens
  source 1..19: mol_type = genomic DNA
gtcggtagagcatgagacc

SEQ ID NO: 62289 - DNA, 39 bp, Homo sapiens; identical to SEQ ID NO: 20817
  source 1..39: mol_type = genomic DNA

SEQ ID NO: 62290 - DNA, 31 bp, Homo sapiens; identical to SEQ ID NO: 20788
  source 1..31: mol_type = genomic DNA

SEQ ID NO: 62291 - DNA, 34 bp, Homo sapiens; identical to SEQ ID NO: 20780
  source 1..34: mol_type = genomic DNA

SEQ ID NO: 62292 - DNA, 33 bp, Homo sapiens; identical to SEQ ID NO: 20779
  source 1..33: mol_type = genomic DNA

SEQ ID NO: 62293 - DNA, 29 bp, Homo sapiens
  source 1..29: mol_type = genomic DNA
gtccgcgtgggttcgaaccccactcctgg

SEQ ID NO: 62294 - DNA, 17 bp, Homo sapiens
  source 1..17: mol_type = genomic DNA
gtccctgttcaggcacc

SEQ ID NO: 62295 - DNA, 18 bp, Homo sapiens
  source 1..18: mol_type = genomic DNA
gtcccggcagagatgcca

SEQ ID NO: 62296 - DNA, 35 bp, Homo sapiens; identical to SEQ ID NO: 20732
  source 1..35: mol_type = genomic DNA

SEQ ID NO: 62297 - DNA, 17 bp, Homo sapiens
  source 1..17: mol_type = genomic DNA
gtcaggatggccgagca

SEQ ID NO: 62298 - DNA, 28 bp, Homo sapiens
  source 1..28: mol_type = genomic DNA
gtcagctaaataagctatcgggcccata

SEQ ID NO: 62299 - DNA, 23 bp, Homo sapiens
  source 1..23: mol_type = genomic DNA
gtcagctaaataagctatcgggc

SEQ ID NO: 62300 - DNA, 19 bp, Homo sapiens
  source 1..19: mol_type = genomic DNA
gtcagaggttcaattcctc

SEQ ID NO: 62301 - DNA, 35 bp, Homo sapiens; identical to SEQ ID NO: 20629
  source 1..35: mol_type = genomic DNA

SEQ ID NO: 62302 - DNA, 33 bp, Homo sapiens; identical to SEQ ID NO: 20573
  source 1..33: mol_type = genomic DNA

SEQ ID NO: 62303 - DNA, 21 bp, Homo sapiens
  source 1..21: mol_type = genomic DNA
gtatagtggttagcatagctg

SEQ ID NO: 62304 - DNA, 30 bp, Homo sapiens; identical to SEQ ID NO: 20531
  source 1..30: mol_type = genomic DNA

SEQ ID NO: 62305 - DNA, 31 bp, Homo sapiens; identical to SEQ ID NO: 20523
  source 1..31: mol_type = genomic DNA

SEQ ID NO: 62306 - DNA, 33 bp, Homo sapiens; identical to SEQ ID NO: 20513
  source 1..33: mol_type = genomic DNA

SEQ ID NO: 62307 - DNA, 28 bp, Homo sapiens
  source 1..28: mol_type = genomic DNA
gtagtggttatcacgttcgcctcacacg

SEQ ID NO: 62308 - DNA, 28 bp, Homo sapiens
  source 1..28: mol_type = genomic DNA
gtagcttacctcctcaaagcaatacact

SEQ ID NO: 62309 - DNA, 35 bp, Homo sapiens; identical to SEQ ID NO: 20410
  source 1..35: mol_type = genomic DNA

SEQ ID NO: 62310 - DNA, 33 bp, Homo sapiens; identical to SEQ ID NO: 20408
  source 1..33: mol_type = genomic DNA

SEQ ID NO: 62311 - DNA, 24 bp, Homo sapiens
  source 1..24: mol_type = genomic DNA
gtagagcatgggactcttaatccc

SEQ ID NO: 62312 - DNA, 34 bp, Homo sapiens; identical to SEQ ID NO: 20393
  source 1..34: mol_type = genomic DNA

SEQ ID NO: 62313 - DNA, 23 bp, Homo sapiens
  source 1..23: mol_type = genomic DNA
gtagagcatgagactcttaatct

SEQ ID NO: 62314 - DNA, 20 bp, Homo sapiens
  source 1..20: mol_type = genomic DNA
gtagagcatgagactcttaa

SEQ ID NO: 62315 - DNA, 23 bp, Homo sapiens
  source 1..23: mol_type = genomic DNA
gtagagcatgagacccttaatct

SEQ ID NO: 62316 - DNA, 16 bp, Homo sapiens
  source 1..16: mol_type = genomic DNA
gtagagcatgagaccc

SEQ ID NO: 62317 - DNA, 33 bp, Homo sapiens; identical to SEQ ID NO: 20338
  source 1..33: mol_type = genomic DNA

SEQ ID NO: 62318 - DNA, 42 bp, Homo sapiens; identical to SEQ ID NO: 20331
  source 1..42: mol_type = genomic DNA

SEQ ID NO: 62319 - DNA, 34 bp, Homo sapiens; identical to SEQ ID NO: 20314
  source 1..34: mol_type = genomic DNA

SEQ ID NO: 62320 - DNA, 16 bp, Homo sapiens
  source 1..16: mol_type = genomic DNA
gtaatggtgagcactc

SEQ ID NO: 62321 - DNA, 20 bp, Homo sapiens
  source 1..20: mol_type = genomic DNA
gtaatggtaagcactctgga

SEQ ID NO: 62322 - DNA, 32 bp, Homo sapiens; identical to SEQ ID NO: 20281
  source 1..32: mol_type = genomic DNA

SEQ ID NO: 62323 - DNA, 41 bp, Homo sapiens; identical to SEQ ID NO: 20216
  source 1..41: mol_type = genomic DNA

SEQ ID NO: 62324 - DNA, 33 bp, Homo sapiens; identical to SEQ ID NO: 20206
  source 1..33: mol_type = genomic DNA

SEQ ID NO: 62325 - DNA, 45 bp, Homo sapiens; identical to SEQ ID NO: 20165
  source 1..45: mol_type = genomic DNA

SEQ ID NO: 62326 - DNA, 41 bp, Homo sapiens; identical to SEQ ID NO: 20161
  source 1..41: mol_type = genomic DNA

SEQ ID NO: 62327 - DNA, 40 bp, Homo sapiens; identical to SEQ ID NO: 20160
  source 1..40: mol_type = genomic DNA

SEQ ID NO: 62328 - DNA, 39 bp, Homo sapiens; identical to SEQ ID NO: 20159
  source 1..39: mol_type = genomic DNA

SEQ ID NO: 62329 - DNA, 38 bp, Homo sapiens; identical to SEQ ID NO: 20158
  source 1..38: mol_type = genomic DNA

SEQ ID NO: 62330 - DNA, 20 bp, Homo sapiens
  source 1..20: mol_type = genomic DNA
ggttcgattcccggccaatg

SEQ ID NO: 62331 - DNA, 24 bp, Homo sapiens
  source 1..24: mol_type = genomic DNA
ggttcgatcccgggcggaaacacc

SEQ ID NO: 62332 - DNA, 48 bp, Homo sapiens; identical to SEQ ID NO: 19948
  source 1..48: mol_type = genomic DNA

SEQ ID NO: 62333 - DNA, 34 bp, Homo sapiens; identical to SEQ ID NO: 19911
  source 1..34: mol_type = genomic DNA

SEQ ID NO: 62334 - DNA, 32 bp, Homo sapiens; identical to SEQ ID NO: 19909
  source 1..32: mol_type = genomic DNA

SEQ ID NO: 62335 - DNA, 38 bp, Homo sapiens; identical to SEQ ID NO: 19900
  source 1..38: mol_type = genomic DNA

SEQ ID NO: 62336 - DNA, 37 bp, Homo sapiens; identical to SEQ ID NO: 19888
  source 1..37: mol_type = genomic DNA

SEQ ID NO: 62337 - DNA, 22 bp, Homo sapiens
  source 1..22: mol_type = genomic DNA
ggttatcacgtctgctttacac

SEQ ID NO: 62338 - DNA, 39 bp, Homo sapiens; identical to SEQ ID NO: 19763
  source 1..39: mol_type = genomic DNA

SEQ ID NO: 62339 - DNA, 17 bp, Homo sapiens
  source 1..17: mol_type = genomic DNA
ggttagcgcgttcggct

SEQ ID NO: 62340 - DNA, 40 bp, Homo sapiens; identical to SEQ ID NO: 19720
  source 1..40: mol_type = genomic DNA

SEQ ID NO: 62341 - DNA, 40 bp, Homo sapiens; identical to SEQ ID NO: 19702
  source 1..40: mol_type = genomic DNA

SEQ ID NO: 62342 - DNA, 28 bp, Homo sapiens
  source 1..28: mol_type = genomic DNA
ggtgtaatggtgagcactctggactctg

SEQ ID NO: 62343 - DNA, 33 bp, Homo sapiens; identical to SEQ ID NO: 19576
  source 1..33: mol_type = genomic DNA

SEQ ID NO: 62344 - DNA, 26 bp, Homo sapiens
  source 1..26: mol_type = genomic DNA
ggtgctaatggtggagttaaagactt

SEQ ID NO: 62345 - DNA, 24 bp, Homo sapiens
  source 1..24: mol_type = genomic DNA
ggtctccaatggaggcgtgggttc

SEQ ID NO: 62346 - DNA, 31 bp, Homo sapiens; identical to SEQ ID NO: 19410
  source 1..31: mol_type = genomic DNA

SEQ ID NO: 62347 - DNA, 28 bp, Homo sapiens
  source 1..28: mol_type = genomic DNA
ggtcgcgggttcgatccccgtacgggcc

SEQ ID NO: 62348 - DNA, 47 bp, Homo sapiens; identical to SEQ ID NO: 19346
  source 1..47: mol_type = genomic DNA

SEQ ID NO: 62349 - DNA, 28 bp, Homo sapiens
  source 1..28: mol_type = genomic DNA
ggtcagctaaataagctatcgggcccat

SEQ ID NO: 62350 - DNA, 17 bp, Homo sapiens
  source 1..17: mol_type = genomic DNA
ggtatgattctcgctta

SEQ ID NO: 62351 - DNA, 23 bp, Homo sapiens
  source 1..23: mol_type = genomic DNA
ggtagctcagtcggtagagcatc

SEQ ID NO: 62352 - DNA, 33 bp, Homo sapiens; identical to SEQ ID NO: 19281
  source 1..33: mol_type = genomic DNA

SEQ ID NO: 62353 - DNA, 40 bp, Homo sapiens; identical to SEQ ID NO: 19243
  source 1..40: mol_type = genomic DNA

SEQ ID NO: 62354 - DNA, 36 bp, Homo sapiens; identical to SEQ ID NO: 19222
  source 1..36: mol_type = genomic DNA

SEQ ID NO: 62355 - DNA, 18 bp, Homo sapiens
  source 1..18: mol_type = genomic DNA
ggtagagcatgagaccct

SEQ ID NO: 62356 - DNA, 17 bp, Homo sapiens
  source 1..17: mol_type = genomic DNA
ggtagagcatgagaccc

SEQ ID NO: 62357 - DNA, 16 bp, Homo sapiens
  source 1..16: mol_type = genomic DNA
ggtagagcatgagacc

SEQ ID NO: 62358 - DNA, 34 bp, Homo sapiens; identical to SEQ ID NO: 19196
  source 1..34: mol_type = genomic DNA

SEQ ID NO: 62359 - DNA, 33 bp, Homo sapiens; identical to SEQ ID NO: 19195
  source 1..33: mol_type = genomic DNA

SEQ ID NO: 62360 - DNA, 28 bp, Homo sapiens
  source 1..28: mol_type = genomic DNA
ggtaatcgcataaaacttaaaactttac

SEQ ID NO: 62361 - DNA, 36 bp, Homo sapiens; identical to SEQ ID NO: 19152
  source 1..36: mol_type = genomic DNA

SEQ ID NO: 62362 - DNA, 41 bp, Homo sapiens; identical to SEQ ID NO: 19129
  source 1..41: mol_type = genomic DNA

SEQ ID NO: 62363 - DNA, 39 bp, Homo sapiens; identical to SEQ ID NO: 19127
  source 1..39: mol_type = genomic DNA

SEQ ID NO: 62364 - DNA, 27 bp, Homo sapiens
  source 1..27: mol_type = genomic DNA
gggtgtagctcagtggtagagcatttg

SEQ ID NO: 62365 - DNA, 21 bp, Homo sapiens
  source 1..21: mol_type = genomic DNA
gggtggttcagtggtagaatt

SEQ ID NO: 62366 - DNA, 21 bp, Homo sapiens
  source 1..21: mol_type = genomic DNA
gggtcgtgggttcgagcccca

SEQ ID NO: 62367 - DNA, 18 bp, Homo sapiens
  source 1..18: mol_type = genomic DNA
ggggttcgattccttcct

SEQ ID NO: 62368 - DNA, 32 bp, Homo sapiens; identical to SEQ ID NO: 18822
  source 1..32: mol_type = genomic DNA

SEQ ID NO: 62369 - DNA, 28 bp, Homo sapiens
  source 1..28: mol_type = genomic DNA
ggggtatagctcagtggtagagcatttg

SEQ ID NO: 62370 - DNA, 34 bp, Homo sapiens; identical to SEQ ID NO: 18767
  source 1..34: mol_type = genomic DNA

SEQ ID NO: 62371 - DNA, 33 bp, Homo sapiens; identical to SEQ ID NO: 18716
  source 1..33: mol_type = genomic DNA

SEQ ID NO: 62372 - DNA, 27 bp, Homo sapiens
  source 1..27: mol_type = genomic DNA
ggggcgtgggttcgaatcccaccgctg

SEQ ID NO: 62373 - DNA, 32 bp, Homo sapiens; identical to SEQ ID NO: 18677
  source 1..32: mol_type = genomic DNA

SEQ ID NO: 62374 - DNA, 28 bp, Homo sapiens
  source 1..28: mol_type = genomic DNA
gggcccataccccgaaaatgttggttat

SEQ ID NO: 62375 - DNA, 33 bp, Homo sapiens; identical to SEQ ID NO: 18529
  source 1..33: mol_type = genomic DNA

SEQ ID NO: 62376 - DNA, 30 bp, Homo sapiens; identical to SEQ ID NO: 18502
  source 1..30: mol_type = genomic DNA

SEQ ID NO: 62377 - DNA, 20 bp, Homo sapiens
  source 1..20: mol_type = genomic DNA
ggctgagtgaagcattggac

SEQ ID NO: 62378 - DNA, 35 bp, Homo sapiens; identical to SEQ ID NO: 18413
  source 1..35: mol_type = genomic DNA

SEQ ID NO: 62379 - DNA, 48 bp, Homo sapiens; identical to SEQ ID NO: 18379
  source 1..48: mol_type = genomic DNA

SEQ ID NO: 62380 - DNA, 48 bp, Homo sapiens; identical to SEQ ID NO: 18364
  source 1..48: mol_type = genomic DNA

SEQ ID NO: 62381 - DNA, 31 bp, Homo sapiens; identical to SEQ ID NO: 18353
  source 1..31: mol_type = genomic DNA

SEQ ID NO: 62382 - DNA, 48 bp, Homo sapiens; identical to SEQ ID NO: 18318
  source 1..48: mol_type = genomic DNA

SEQ ID NO: 62383 - DNA, 47 bp, Homo sapiens; identical to SEQ ID NO: 18317
  source 1..47: mol_type = genomic DNA

SEQ ID NO: 62384 - DNA, 29 bp, Homo sapiens
  source 1..29: mol_type = genomic DNA
ggcgctctcaccgccgcggcccgggttcg

SEQ ID NO: 62385 - DNA, 28 bp, Homo sapiens
  source 1..28: mol_type = genomic DNA
ggcgctctcaccgccgcggcccgggttc

SEQ ID NO: 62386 - DNA, 16 bp, Homo sapiens
  source 1..16: mol_type = genomic DNA
ggcgcaatcggttagc

SEQ ID NO: 62387 - DNA, 34 bp, Homo sapiens; identical to SEQ ID NO: 18197
  source 1..34: mol_type = genomic DNA

SEQ ID NO: 62388 - DNA, 42 bp, Homo sapiens; identical to SEQ ID NO: 18174
  source 1..42: mol_type = genomic DNA

SEQ ID NO: 62389 - DNA, 34 bp, Homo sapiens; identical to SEQ ID NO: 18138
  source 1..34: mol_type = genomic DNA

SEQ ID NO: 62390 - DNA, 31 bp, Homo sapiens; identical to SEQ ID NO: 18135
  source 1..31: mol_type = genomic DNA

SEQ ID NO: 62391 - DNA, 35 bp, Homo sapiens; identical to SEQ ID NO: 18134
  source 1..35: mol_type = genomic DNA

SEQ ID NO: 62392 - DNA, 26 bp, Homo sapiens
  source 1..26: mol_type = genomic DNA
ggcagagcccggtaatcgcataaaac

SEQ ID NO: 62393 - DNA, 39 bp, Homo sapiens; identical to SEQ ID NO: 18109
  source 1..39: mol_type = genomic DNA

SEQ ID NO: 62394 - DNA, 37 bp, Homo sapiens; identical to SEQ ID NO: 18108
  source 1..37: mol_type = genomic DNA

SEQ ID NO: 62395 - DNA, 26 bp, Homo sapiens
  source 1..26: mol_type = genomic DNA
ggattcggcgctctcaccgccgcggc

SEQ ID NO: 62396 - DNA, 29 bp, Homo sapiens
  source 1..29: mol_type = genomic DNA
ggattcctggttttcacccaggcggcccg

SEQ ID NO: 62397 - DNA, 27 bp, Homo sapiens
  source 1..27: mol_type = genomic DNA
ggatgggttcgattctcatagtcctag

SEQ ID NO: 62398 - DNA, 44 bp, Homo sapiens; identical to SEQ ID NO: 17898
  source 1..44: mol_type = genomic DNA

SEQ ID NO: 62399 - DNA, 47 bp, Homo sapiens; identical to SEQ ID NO: 17896
  source 1..47: mol_type = genomic DNA

SEQ ID NO: 62400 - DNA, 46 bp, Homo sapiens; identical to SEQ ID NO: 17895
  source 1..46: mol_type = genomic DNA

SEQ ID NO: 62401 - DNA, 41 bp, Homo sapiens; identical to SEQ ID NO: 17862
  source 1..41: mol_type = genomic DNA

SEQ ID NO: 62402 - DNA, 33 bp, Homo sapiens; identical to SEQ ID NO: 17773
  source 1..33: mol_type = genomic DNA

SEQ ID NO: 62403 - DNA, 26 bp, Homo sapiens
  source 1..26: mol_type = genomic DNA
gctggttcgattccggctcgaaggac

SEQ ID NO: 62404 - DNA, 32 bp, Homo sapiens; identical to SEQ ID NO: 17696
  source 1..32: mol_type = genomic DNA

SEQ ID NO: 62405 - DNA, 48 bp, Homo sapiens; identical to SEQ ID NO: 17689
  source 1..48: mol_type = genomic DNA

SEQ ID NO: 62406 - DNA, 44 bp, Homo sapiens; identical to SEQ ID NO: 17672
  source 1..44: mol_type = genomic DNA

SEQ ID NO: 62407 - DNA, 29 bp, Homo sapiens
  source 1..29: mol_type = genomic DNA
gctctcaccgccgcggcccgggttcgatt

SEQ ID NO: 62408 - DNA, 29 bp, Homo sapiens
  source 1..29: mol_type = genomic DNA
gctccgtggcgcaatggatagcgcattgg

SEQ ID NO: 62409 - DNA, 45 bp, Homo sapiens; identical to SEQ ID NO: 17637
  source 1..45: mol_type = genomic DNA

SEQ ID NO: 62410 - DNA, 33 bp, Homo sapiens; identical to SEQ ID NO: 17631
  source 1..33: mol_type = genomic DNA

SEQ ID NO: 62411 - DNA, 46 bp, Homo sapiens; identical to SEQ ID NO: 17597
  source 1..46: mol_type = genomic DNA

SEQ ID NO: 62412 - DNA, 32 bp, Homo sapiens; identical to SEQ ID NO: 17588
  source 1..32: mol_type = genomic DNA

SEQ ID NO: 62413 - DNA, 43 bp, Homo sapiens; identical to SEQ ID NO: 17586
  source 1..43: mol_type = genomic DNA

SEQ ID NO: 62414 - DNA, 30 bp, Homo sapiens; identical to SEQ ID NO: 17581
  source 1..30: mol_type = genomic DNA

SEQ ID NO: 62415 - DNA, 33 bp, Homo sapiens; identical to SEQ ID NO: 17570
  source 1..33: mol_type = genomic DNA

SEQ ID NO: 62416 - DNA, 31 bp, Homo sapiens; identical to SEQ ID NO: 17568
  source 1..31: mol_type = genomic DNA

SEQ ID NO: 62417 - DNA, 26 bp, Homo sapiens
  source 1..26: mol_type = genomic DNA
gctcagtcggtagagcatgagaccct

SEQ ID NO: 62418 - DNA, 25 bp, Homo sapiens
  source 1..25: mol_type = genomic DNA
gctcagtcggtagagcatgagaccc

SEQ ID NO: 62419 - DNA, 35 bp, Homo sapiens; identical to SEQ ID NO: 17526
  source 1..35: mol_type = genomic DNA

SEQ ID NO: 62420 - DNA, 34 bp, Homo sapiens; identical to SEQ ID NO: 17503
  source 1..34: mol_type = genomic DNA

SEQ ID NO: 62421 - DNA, 33 bp, Homo sapiens; identical to SEQ ID NO: 17502
  source 1..33: mol_type = genomic DNA

SEQ ID NO: 62422 - DNA, 28 bp, Homo sapiens
  source 1..28: mol_type = genomic DNA
gctatcgggcccataccccgaaaatgtt

SEQ ID NO: 62423 - DNA, 22 bp, Homo sapiens
  source 1..22: mol_type = genomic DNA
gctaggattcggcgctttcacc

SEQ ID NO: 62424 - DNA, 30 bp, Homo sapiens; identical to SEQ ID NO: 17443
  source 1..30: mol_type = genomic DNA

SEQ ID NO: 62425 - DNA, 16 bp, Homo sapiens
  source 1..16: mol_type = genomic DNA
gctagctcagtcggta

SEQ ID NO: 62426 - DNA, 38 bp, Homo sapiens; identical to SEQ ID NO: 17366
  source 1..38: mol_type = genomic DNA

SEQ ID NO: 62427 - DNA, 48 bp, Homo sapiens; identical to SEQ ID NO: 17348
  source 1..48: mol_type = genomic DNA

SEQ ID NO: 62428 - DNA, 37 bp, Homo sapiens; identical to SEQ ID NO: 17342
  source 1..37: mol_type = genomic DNA

SEQ ID NO: 62429 - DNA, 24 bp, Homo sapiens
  source 1..24: mol_type = genomic DNA
gcgtgttcaaatcacgtcggggtc

SEQ ID NO: 62430 - DNA, 32 bp, Homo sapiens; identical to SEQ ID NO: 17214
  source 1..32: mol_type = genomic DNA

SEQ ID NO: 62431 - DNA, 41 bp, Homo sapiens; identical to SEQ ID NO: 17169
  source 1..41: mol_type = genomic DNA

SEQ ID NO: 62432 - DNA, 47 bp, Homo sapiens; identical to SEQ ID NO: 17155
  source 1..47: mol_type = genomic DNA

SEQ ID NO: 62433 - DNA, 32 bp, Homo sapiens; identical to SEQ ID NO: 17143
  source 1..32: mol_type = genomic DNA

SEQ ID NO: 62434 - DNA, 30 bp, Homo sapiens; identical to SEQ ID NO: 17141
  source 1..30: mol_type = genomic DNA

SEQ ID NO: 62435 - DNA, 29 bp, Homo sapiens
  source 1..29: mol_type = genomic DNA
gcgatccgagttcaaatctcggtggaacc

SEQ ID NO: 62436 - DNA, 28 bp, Homo sapiens
  source 1..28: mol_type = genomic DNA
gcgatccgagttcaaatctcggtggaac

SEQ ID NO: 62437 - DNA, 35 bp, Homo sapiens; identical to SEQ ID NO: 17064
  source 1..35: mol_type = genomic DNA

SEQ ID NO: 62438 - DNA, 34 bp, Homo sapiens; identical to SEQ ID NO: 17050
  source 1..34: mol_type = genomic DNA

SEQ ID NO: 62439 - DNA, 42 bp, Homo sapiens; identical to SEQ ID NO: 17025
  source 1..42: mol_type = genomic DNA

SEQ ID NO: 62440 - DNA, 48 bp, Homo sapiens; identical to SEQ ID NO: 16967
  source 1..48: mol_type = genomic DNA

SEQ ID NO: 62441 - DNA, 42 bp, Homo sapiens; identical to SEQ ID NO: 16963
  source 1..42: mol_type = genomic DNA

SEQ ID NO: 62442 - DNA, 48 bp, Homo sapiens; identical to SEQ ID NO: 16935
  source 1..48: mol_type = genomic DNA

SEQ ID NO: 62443 - DNA, 37 bp, Homo sapiens; identical to SEQ ID NO: 16932
  source 1..37: mol_type = genomic DNA

SEQ ID NO: 62444 - DNA, 20 bp, Homo sapiens
  source 1..20: mol_type = genomic DNA
gccgcagcaacctcggttcg

SEQ ID NO: 62445 - DNA, 30 bp, Homo sapiens; identical to SEQ ID NO: 16867
  source 1..30: mol_type = genomic DNA

SEQ ID NO: 62446 - DNA, 17 bp, Homo sapiens
  source 1..17: mol_type = genomic DNA
gccccgggttcgatccc

SEQ ID NO: 62447 - DNA, 34 bp, Homo sapiens; identical to SEQ ID NO: 16749
  source 1..34: mol_type = genomic DNA

SEQ ID NO: 62448 - DNA, 38 bp, Homo sapiens; identical to SEQ ID NO: 16733
  source 1..38: mol_type = genomic DNA

SEQ ID NO: 62449 - DNA, 25 bp, Homo sapiens
  source 1..25: mol_type = genomic DNA
gcccataacccagaggtcgatggat

SEQ ID NO: 62450 - DNA, 28 bp, Homo sapiens
  source 1..28: mol_type = genomic DNA
gccatgatcgtatagtggttagtactct

SEQ ID NO: 62451 - DNA, 30 bp, Homo sapiens; identical to SEQ ID NO: 16696
  source 1..30: mol_type = genomic DNA

SEQ ID NO: 62452 - DNA, 35 bp, Homo sapiens; identical to SEQ ID NO: 16692
  source 1..35: mol_type = genomic DNA

SEQ ID NO: 62453 - DNA, 40 bp, Homo sapiens; identical to SEQ ID NO: 16679
  source 1..40: mol_type = genomic DNA

SEQ ID NO: 62454 - DNA, 37 bp, Homo sapiens; identical to SEQ ID NO: 16678
  source 1..37: mol_type = genomic DNA

SEQ ID NO: 62455 - DNA, 36 bp, Homo sapiens; identical to SEQ ID NO: 16666
  source 1..36: mol_type = genomic DNA

SEQ ID NO: 62456 - DNA, 48 bp, Homo sapiens; identical to SEQ ID NO: 16655
  source 1..48: mol_type = genomic DNA

SEQ ID NO: 62457 - DNA, 41 bp, Homo sapiens; identical to SEQ ID NO: 16602
  source 1..41: mol_type = genomic DNA

SEQ ID NO: 62458 - DNA, 48 bp, Homo sapiens; identical to SEQ ID NO: 16576
  source 1..48: mol_type = genomic DNA

SEQ ID NO: 62459 - DNA, 22 bp, Homo sapiens
  source 1..22: mol_type = genomic DNA
gcagcttcaaacctgccggggc

SEQ ID NO: 62460 - DNA, 48 bp, Homo sapiens; identical to SEQ ID NO: 16444
  source 1..48: mol_type = genomic DNA

SEQ ID NO: 62461 - DNA, 28 bp, Homo sapiens
  source 1..28: mol_type = genomic DNA
gcagaaggtcctgggttcgagccccagt

SEQ ID NO: 62462 - DNA, 37 bp, Homo sapiens; identical to SEQ ID NO: 16382
  source 1..37: mol_type = genomic DNA

SEQ ID NO: 62463 - DNA, 37 bp, Homo sapiens; identical to SEQ ID NO: 16346
  source 1..37: mol_type = genomic DNA

SEQ ID NO: 62464 - DNA, 31 bp, Homo sapiens; identical to SEQ ID NO: 16312
  source 1..31: mol_type = genomic DNA

SEQ ID NO: 62465 - DNA, 39 bp, Homo sapiens; identical to SEQ ID NO: 16292
  source 1..39: mol_type = genomic DNA

SEQ ID NO: 62466 - DNA, 26 bp, Homo sapiens
  source 1..26: mol_type = genomic DNA
gatttcgactcattaaattatgataa

SEQ ID NO: 62467 - DNA, 31 bp, Homo sapiens; identical to SEQ ID NO: 16238
  source 1..31: mol_type = genomic DNA

SEQ ID NO: 62468 - DNA, 34 bp, Homo sapiens; identical to SEQ ID NO: 16184
  source 1..34: mol_type = genomic DNA

SEQ ID NO: 62469 - DNA, 38 bp, Homo sapiens; identical to SEQ ID NO: 16176
  source 1..38: mol_type = genomic DNA

SEQ ID NO: 62470 - DNA, 19 bp, Homo sapiens
  source 1..19: mol_type = genomic DNA
gattcccgggcggcgcacc

SEQ ID NO: 62471 - DNA, 46 bp, Homo sapiens; identical to SEQ ID NO: 16117
  source 1..46: mol_type = genomic DNA

SEQ ID NO: 62472 - DNA, 25 bp, Homo sapiens
  source 1..25: mol_type = genomic DNA
gattaagagaaccaacacctcttta

SEQ ID NO: 62473 - DNA, 39 bp, Homo sapiens; identical to SEQ ID NO: 16062
  source 1..39: mol_type = genomic DNA

SEQ ID NO: 62474 - DNA, 28 bp, Homo sapiens
  source 1..28: mol_type = genomic DNA
gatgggttcgattctcatagtcctagcc

SEQ ID NO: 62475 - DNA, 28 bp, Homo sapiens
  source 1..28: mol_type = genomic DNA
gatggcagagcccggtaatcgcataaaa

SEQ ID NO: 62476 - DNA, 26 bp, Homo sapiens
  source 1..26: mol_type = genomic DNA
gatggcagagcccggtaatcgcataa

SEQ ID NO: 62477 - DNA, 16 bp, Homo sapiens
  source 1..16: mol_type = genomic DNA
gatccttaggtcgctg

SEQ ID NO: 62478 - DNA, 19 bp, Homo sapiens
  source 1..19: mol_type = genomic DNA
gatccgagttcgagtctcg

SEQ ID NO: 62479 - DNA, 37 bp, Homo sapiens; identical to SEQ ID NO: 15920
  source 1..37: mol_type = genomic DNA

SEQ ID NO: 62480 - DNA, 20 bp, Homo sapiens
  source 1..20: mol_type = genomic DNA
gataaaagagttactttgat

SEQ ID NO: 62481 - DNA, 32 bp, Homo sapiens; identical to SEQ ID NO: 15801
  source 1..32: mol_type = genomic DNA

SEQ ID NO: 62482 - DNA, 23 bp, Homo sapiens
  source 1..23: mol_type = genomic DNA
gagtggtctaaggcgccagactc

SEQ ID NO: 62483 - DNA, 33 bp, Homo sapiens; identical to SEQ ID NO: 15757
  source 1..33: mol_type = genomic DNA

SEQ ID NO: 62484 - DNA, 23 bp, Homo sapiens
  source 1..23: mol_type = genomic DNA
gagtaaataataggagcttaaac

SEQ ID NO: 62485 - DNA, 27 bp, Homo sapiens
  source 1..27: mol_type = genomic DNA
gaggcgtgggttcgaatcccacttctg

SEQ ID NO: 62486 - DNA, 21 bp, Homo sapiens
  source 1..21: mol_type = genomic DNA
gagcatgggactcttaatctc

SEQ ID NO: 62487 - DNA, 20 bp, Homo sapiens
  source 1..20: mol_type = genomic DNA
gagcatgggactcttaatcc

SEQ ID NO: 62488 - DNA, 34 bp, Homo sapiens; identical to SEQ ID NO: 15596
  source 1..34: mol_type = genomic DNA

SEQ ID NO: 62489 - DNA, 25 bp, Homo sapiens
  source 1..25: mol_type = genomic DNA
gagatgaaaacctttttccaaggac

SEQ ID NO: 62490 - DNA, 35 bp, Homo sapiens; identical to SEQ ID NO: 15529
  source 1..35: mol_type = genomic DNA

SEQ ID NO: 62491 - DNA, 24 bp, Homo sapiens
  source 1..24: mol_type = genomic DNA
gagaatagtttaaattagaatctt

SEQ ID NO: 62492 - DNA, 48 bp, Homo sapiens; identical to SEQ ID NO: 15503
  source 1..48: mol_type = genomic DNA

SEQ ID NO: 62493 - DNA, 19 bp, Homo sapiens
  source 1..19: mol_type = genomic DNA
gacttttaaaggataacag

SEQ ID NO: 62494 - DNA, 45 bp, Homo sapiens; identical to SEQ ID NO: 15466
  source 1..45: mol_type = genomic DNA

SEQ ID NO: 62495 - DNA, 45 bp, Homo sapiens; identical to SEQ ID NO: 15432
  source 1..45: mol_type = genomic DNA

SEQ ID NO: 62496 - DNA, 46 bp, Homo sapiens; identical to SEQ ID NO: 15428
  source 1..46: mol_type = genomic DNA

SEQ ID NO: 62497 - DNA, 43 bp, Homo sapiens; identical to SEQ ID NO: 15425
  source 1..43: mol_type = genomic DNA

SEQ ID NO: 62498 - DNA, 40 bp, Homo sapiens; identical to SEQ ID NO: 15423
  source 1..40: mol_type = genomic DNA

SEQ ID NO: 62499 - DNA, 44 bp, Homo sapiens; identical to SEQ ID NO: 15269
  source 1..44: mol_type = genomic DNA

SEQ ID NO: 62500 - DNA, 26 bp, Homo sapiens
  source 1..26: mol_type = genomic DNA
gaattgcaaattcgaagaagcagctt

SEQ ID NO: 62501 - DNA, 31 bp, Homo sapiens; identical to SEQ ID NO: 15255
  source 1..31: mol_type = genomic DNA

SEQ ID NO: 62502 - DNA, 33 bp, Homo sapiens; identical to SEQ ID NO: 15167
  source 1..33: mol_type = genomic DNA

SEQ ID NO: 62503 - DNA, 29 bp, Homo sapiens
  source 1..29: mol_type = genomic DNA
gaaggctgcgtgttcgaatcacgtcgggg

SEQ ID NO: 62504 - DNA, 37 bp, Homo sapiens; identical to SEQ ID NO: 15128
  source 1..37: mol_type = genomic DNA

SEQ ID NO: 62505 - DNA, 48 bp, Homo sapiens; identical to SEQ ID NO: 15008
  source 1..48: mol_type = genomic DNA

SEQ ID NO: 62506 - DNA, 23 bp, Homo sapiens
  source 1..23: mol_type = genomic DNA
gaaaggtccccggttcgaaaccg

SEQ ID NO: 62507 - DNA, 48 bp, Homo sapiens; identical to SEQ ID NO: 14981
  source 1..48: mol_type = genomic DNA

SEQ ID NO: 62508 - DNA, 37 bp, Homo sapiens; identical to SEQ ID NO: 14883
  source 1..37: mol_type = genomic DNA

SEQ ID NO: 62509 - DNA, 31 bp, Homo sapiens; identical to SEQ ID NO: 14878
  source 1..31: mol_type = genomic DNA

SEQ ID NO: 62510 - DNA, 30 bp, Homo sapiens; identical to SEQ ID NO: 14857
  source 1..30: mol_type = genomic DNA

SEQ ID NO: 62511 - DNA, 44 bp, Homo sapiens; identical to SEQ ID NO: 14846
  source 1..44: mol_type = genomic DNA

SEQ ID NO: 62512 - DNA, 41 bp, Homo sapiens; identical to SEQ ID NO: 14844
  source 1..41: mol_type = genomic DNA

SEQ ID NO: 62513 - DNA, 16 bp, Homo sapiens
  source 1..16: mol_type = genomic DNA
cttttaagttaaagat

SEQ ID NO: 62514 - DNA, 43 bp, Homo sapiens; identical to SEQ ID NO: 14819
  source 1..43: mol_type = genomic DNA

SEQ ID NO: 62515 - DNA, 39 bp, Homo sapiens; identical to SEQ ID NO: 14817
  source 1..39: mol_type = genomic DNA

SEQ ID NO: 62516 - DNA, 36 bp, Homo sapiens; identical to SEQ ID NO: 14815
  source 1..36: mol_type = genomic DNA

SEQ ID NO: 62517 - DNA, 32 bp, Homo sapiens; identical to SEQ ID NO: 14773
  source 1..32: mol_type = genomic DNA

SEQ ID NO: 62518 - DNA, 37 bp, Homo sapiens; identical to SEQ ID NO: 14763
  source 1..37: mol_type = genomic DNA

SEQ ID NO: 62519 - DNA, 33 bp, Homo sapiens; identical to SEQ ID NO: 14752
  source 1..33: mol_type = genomic DNA

SEQ ID NO: 62520 - DNA, 19 bp, Homo sapiens
  source 1..19: mol_type = genomic DNA
ctttgaatccagcaatccg

SEQ ID NO: 62521 - DNA, 20 bp, Homo sapiens
  source 1..20: mol_type = genomic DNA
ctttcaccgccgcggcccgg

SEQ ID NO: 62522 - DNA, 32 bp, Homo sapiens; identical to SEQ ID NO: 14659
  source 1..32: mol_type = genomic DNA

SEQ ID NO: 62523 - DNA, 34 bp, Homo sapiens; identical to SEQ ID NO: 14626
  source 1..34: mol_type = genomic DNA

SEQ ID NO: 62524 - DNA, 31 bp, Homo sapiens; identical to SEQ ID NO: 14584
  source 1..31: mol_type = genomic DNA

SEQ ID NO: 62525 - DNA, 20 bp, Homo sapiens
  source 1..20: mol_type = genomic DNA
cttaggagatttcaacttaa

SEQ ID NO: 62526 - DNA, 45 bp, Homo sapiens; identical to SEQ ID NO: 14565
  source 1..45: mol_type = genomic DNA

SEQ ID NO: 62527 - DNA, 30 bp, Homo sapiens; identical to SEQ ID NO: 14556
  source 1..30: mol_type = genomic DNA

SEQ ID NO: 62528 - DNA, 48 bp, Homo sapiens; identical to SEQ ID NO: 14547
  source 1..48: mol_type = genomic DNA

SEQ ID NO: 62529 - DNA, 31 bp, Homo sapiens; identical to SEQ ID NO: 14541
  source 1..31: mol_type = genomic DNA

SEQ ID NO: 62530 - DNA, 38 bp, Homo sapiens; identical to SEQ ID NO: 14534
  source 1..38: mol_type = genomic DNA

SEQ ID NO: 62531 - DNA, 27 bp, Homo sapiens
  source 1..27: mol_type = genomic DNA
cttacctcctcaaagcaatacactgaa

SEQ ID NO: 62532 - DNA, 38 bp, Homo sapiens; identical to SEQ ID NO: 14505
  source 1..38: mol_type = genomic DNA

SEQ ID NO: 62533 - DNA, 37 bp, Homo sapiens; identical to SEQ ID NO: 14504
  source 1..37: mol_type = genomic DNA

SEQ ID NO: 62534 - DNA, 33 bp, Homo sapiens; identical to SEQ ID NO: 14500
  source 1..33: mol_type = genomic DNA

SEQ ID NO: 62535 - DNA, 22 bp, Homo sapiens
  source 1..22: mol_type = genomic DNA
cttaattaaagtggctgatttg

SEQ ID NO: 62536 - DNA, 19 bp, Homo sapiens
  source 1..19: mol_type = genomic DNA
cttaattaaagtggctgat

SEQ ID NO: 62537 - DNA, 16 bp, Homo sapiens
  source 1..16: mol_type = genomic DNA
cttaatctcagggtcg

SEQ ID NO: 62538 - DNA, 21 bp, Homo sapiens
  source 1..21: mol_type = genomic DNA
cttaagatccaatggacatat

SEQ ID NO: 62539 - DNA, 25 bp, Homo sapiens
  source 1..25: mol_type = genomic DNA
cttaacacaaagcacccaacttaca

SEQ ID NO: 62540 - DNA, 40 bp, Homo sapiens; identical to SEQ ID NO: 14396
  source 1..40: mol_type = genomic DNA

SEQ ID NO: 62541 - DNA, 35 bp, Homo sapiens; identical to SEQ ID NO: 14393
  source 1..35: mol_type = genomic DNA

SEQ ID NO: 62542 - DNA, 32 bp, Homo sapiens; identical to SEQ ID NO: 14392
  source 1..32: mol_type = genomic DNA

SEQ ID NO: 62543 - DNA, 35 bp, Homo sapiens; identical to SEQ ID NO: 14359
  source 1..35: mol_type = genomic DNA

SEQ ID NO: 62544 - DNA, 32 bp, Homo sapiens; identical to SEQ ID NO: 14352
  source 1..32: mol_type = genomic DNA

SEQ ID NO: 62545 - DNA, 31 bp, Homo sapiens; identical to SEQ ID NO: 14340
  source 1..31: mol_type = genomic DNA

SEQ ID NO: 62546 - DNA, 37 bp, Homo sapiens; identical to SEQ ID NO: 14327
  source 1..37: mol_type = genomic DNA

SEQ ID NO: 62547 - DNA, 17 bp, Homo sapiens
  source 1..17: mol_type = genomic DNA
ctggttcgattccggct

SEQ ID NO: 62548 - DNA, 34 bp, Homo sapiens; identical to SEQ ID NO: 14221
  source 1..34: mol_type = genomic DNA

SEQ ID NO: 62549 - DNA, 29 bp, Homo sapiens
  source 1..29: mol_type = genomic DNA
ctgggcccataacccagaggtcgatggat

SEQ ID NO: 62550 - DNA, 27 bp, Homo sapiens
  source 1..27: mol_type = genomic DNA
ctggatagctcagtcggtagagcatca

SEQ ID NO: 62551 - DNA, 47 bp, Homo sapiens; identical to SEQ ID NO: 14187
  source 1..47: mol_type = genomic DNA

SEQ ID NO: 62552 - DNA, 40 bp, Homo sapiens; identical to SEQ ID NO: 14183
  source 1..40: mol_type = genomic DNA

SEQ ID NO: 62553 - DNA, 37 bp, Homo sapiens; identical to SEQ ID NO: 14152
  source 1..37: mol_type = genomic DNA

SEQ ID NO: 62554 - DNA, 41 bp, Homo sapiens; identical to SEQ ID NO: 14045
  source 1..41: mol_type = genomic DNA

SEQ ID NO: 62555 - DNA, 40 bp, Homo sapiens; identical to SEQ ID NO: 14044
  source 1..40: mol_type = genomic DNA

SEQ ID NO: 62556 - DNA, 25 bp, Homo sapiens
  source 1..25: mol_type = genomic DNA
ctgaatccagcgatccgagttcgag

SEQ ID NO: 62557 - DNA, 39 bp, Homo sapiens; identical to SEQ ID NO: 14035
  source 1..39: mol_type = genomic DNA

SEQ ID NO: 62558 - DNA, 26 bp, Homo sapiens
  source 1..26: mol_type = genomic DNA
ctgaatccagcgatccgagttcaaat

SEQ ID NO: 62559 - DNA, 31 bp, Homo sapiens; identical to SEQ ID NO: 14000
  source 1..31: mol_type = genomic DNA

SEQ ID NO: 62560 - DNA, 24 bp, Homo sapiens
  source 1..24: mol_type = genomic DNA
ctgaaggtcctgagttcgaacctc

SEQ ID NO: 62561 - DNA, 48 bp, Homo sapiens; identical to SEQ ID NO: 13921
  source 1..48: mol_type = genomic DNA

SEQ ID NO: 62562 - DNA, 35 bp, Homo sapiens; identical to SEQ ID NO: 13899
  source 1..35: mol_type = genomic DNA

SEQ ID NO: 62563 - DNA, 41 bp, Homo sapiens; identical to SEQ ID NO: 13897
  source 1..41: mol_type = genomic DNA

SEQ ID NO: 62564 - DNA, 29 bp, Homo sapiens
  source 1..29: mol_type = genomic DNA
ctcctcgttagtatagtggtgagtatccc

SEQ ID NO: 62565 - DNA, 38 bp, Homo sapiens; identical to SEQ ID NO: 13778
  source 1..38: mol_type = genomic DNA

SEQ ID NO: 62566 - DNA, 48 bp, Homo sapiens; identical to SEQ ID NO: 13764
  source 1..48: mol_type = genomic DNA

SEQ ID NO: 62567 - DNA, 35 bp, Homo sapiens; identical to SEQ ID NO: 13753
  source 1..35: mol_type = genomic DNA

SEQ ID NO: 62568 - DNA, 29 bp, Homo sapiens
  source 1..29: mol_type = genomic DNA
ctccctggtggtctagtggttaggattcg

SEQ ID NO: 62569 - DNA, 30 bp, Homo sapiens; identical to SEQ ID NO: 13669
  source 1..30: mol_type = genomic DNA

SEQ ID NO: 62570 - DNA, 44 bp, Homo sapiens; identical to SEQ ID NO: 13630
  source 1..44: mol_type = genomic DNA

SEQ ID NO: 62571 - DNA, 25 bp, Homo sapiens
  source 1..25: mol_type = genomic DNA
ctcataatctgaaggtcctgagttc

SEQ ID NO: 62572 - DNA, 24 bp, Homo sapiens
  source 1..24: mol_type = genomic DNA
ctcagtcggtagagcatgagaccc

SEQ ID NO: 62573 - DNA, 23 bp, Homo sapiens
  source 1..23: mol_type = genomic DNA
ctcagtcggtagagcatgagacc

SEQ ID NO: 62574 - DNA, 25 bp, Homo sapiens
  source 1..25: mol_type = genomic DNA
ctcagtaagttgcaatacttaattt

SEQ ID NO: 62575 - DNA, 18 bp, Homo sapiens
  source 1..18: mol_type = genomic DNA
ctcagggatgggttcgat

SEQ ID NO: 62576 - DNA, 42 bp, Homo sapiens; identical to SEQ ID NO: 13423
  source 1..42: mol_type = genomic DNA

SEQ ID NO: 62577 - DNA, 33 bp, Homo sapiens; identical to SEQ ID NO: 13416
  source 1..33: mol_type = genomic DNA

SEQ ID NO: 62578 - DNA, 32 bp, Homo sapiens; identical to SEQ ID NO: 13415
  source 1..32: mol_type = genomic DNA

SEQ ID NO: 62579 - DNA, 27 bp, Homo sapiens
  source 1..27: mol_type = genomic DNA
ctatcgggcccataccccgaaaatgtt

SEQ ID NO: 62580 - DNA, 23 bp, Homo sapiens
  source 1..23: mol_type = genomic DNA
ctatcgggcccataccccgaaaa

SEQ ID NO: 62581 - DNA, 20 bp, Homo sapiens
  source 1..20: mol_type = genomic DNA
ctatcgggcccataccccga

SEQ ID NO: 62582 - DNA, 33 bp, Homo sapiens; identical to SEQ ID NO: 13395
  source 1..33: mol_type = genomic DNA

SEQ ID NO: 62583 - DNA, 44 bp, Homo sapiens; identical to SEQ ID NO: 13369
  source 1..44: mol_type = genomic DNA

SEQ ID NO: 62584 - DNA, 48 bp, Homo sapiens; identical to SEQ ID NO: 13308
  source 1..48: mol_type = genomic DNA

SEQ ID NO: 62585 - DNA, 46 bp, Homo sapiens; identical to SEQ ID NO: 13296
  source 1..46: mol_type = genomic DNA

SEQ ID NO: 62586 - DNA, 29 bp, Homo sapiens
  source 1..29: mol_type = genomic DNA
ctagctcagtcggtagagcatgagaccct

SEQ ID NO: 62587 - DNA, 32 bp, Homo sapiens; identical to SEQ ID NO: 13255
  source 1..32: mol_type = genomic DNA

SEQ ID NO: 62588 - DNA, 26 bp, Homo sapiens
  source 1..26: mol_type = genomic DNA
ctaatggtggagttaaagactttttc

SEQ ID NO: 62589 - DNA, 28 bp, Homo sapiens
  source 1..28: mol_type = genomic DNA
ctaagtgtttgtgggtttaagtcccatt

SEQ ID NO: 62590 - DNA, 39 bp, Homo sapiens; identical to SEQ ID NO: 13185
  source 1..39: mol_type = genomic DNA

SEQ ID NO: 62591 - DNA, 32 bp, Homo sapiens; identical to SEQ ID NO: 13120
  source 1..32: mol_type = genomic DNA

SEQ ID NO: 62592 - DNA, 32 bp, Homo sapiens; identical to SEQ ID NO: 13093
  source 1..32: mol_type = genomic DNA

SEQ ID NO: 62593 - DNA, 28 bp, Homo sapiens
  source 1..28: mol_type = genomic DNA
ctaaagacaggggttaggcctcttttta

SEQ ID NO: 62594 - DNA, 25 bp, Homo sapiens
  source 1..25: mol_type = genomic DNA
ctaaagacaggggttaggcctcttt

SEQ ID NO: 62595 - DNA, 33 bp, Homo sapiens; identical to SEQ ID NO: 13075
  source 1..33: mol_type = genomic DNA

SEQ ID NO: 62596 - DNA, 32 bp, Homo sapiens; identical to SEQ ID NO: 13063
  source 1..32: mol_type = genomic DNA

SEQ ID NO: 62597 - DNA, 32 bp, Homo sapiens; identical to SEQ ID NO: 13005
  source 1..32: mol_type = genomic DNA

SEQ ID NO: 62598 - DNA, 28 bp, Homo sapiens
  source 1..28: mol_type = genomic DNA
cgttaacttccaattaactagttttgac

SEQ ID NO: 62599 - DNA, 38 bp, Homo sapiens; identical to SEQ ID NO: 12936
  source 1..38: mol_type = genomic DNA

SEQ ID NO: 62600 - DNA, 17 bp, Homo sapiens
  source 1..17: mol_type = genomic DNA
cgtcaggatggccgagc

SEQ ID NO: 62601 - DNA, 37 bp, Homo sapiens; identical to SEQ ID NO: 12903
  source 1..37: mol_type = genomic DNA

SEQ ID NO: 62602 - DNA, 20 bp, Homo sapiens
  source 1..20: mol_type = genomic DNA
cgtagtgtagcggttatcac

SEQ ID NO: 62603 - DNA, 20 bp, Homo sapiens
  source 1..20: mol_type = genomic DNA
cggttcgaaaccgggcggaa

SEQ ID NO: 62604 - DNA, 34 bp, Homo sapiens; identical to SEQ ID NO: 12822
  source 1..34: mol_type = genomic DNA

SEQ ID NO: 62605 - DNA, 17 bp, Homo sapiens
  source 1..17: mol_type = genomic DNA
cggtagagcatttgact

SEQ ID NO: 62606 - DNA, 35 bp, Homo sapiens; identical to SEQ ID NO: 12750
  source 1..35: mol_type = genomic DNA

SEQ ID NO: 62607 - DNA, 17 bp, Homo sapiens
  source 1..17: mol_type = genomic DNA
cggtagagcatgagacc

SEQ ID NO: 62608 - DNA, 27 bp, Homo sapiens
  source 1..27: mol_type = genomic DNA
cggggttcaattccccgacggggagcc

SEQ ID NO: 62609 - DNA, 43 bp, Homo sapiens; identical to SEQ ID NO: 12604
  source 1..43: mol_type = genomic DNA

SEQ ID NO: 62610 - DNA, 32 bp, Homo sapiens; identical to SEQ ID NO: 12597
  source 1..32: mol_type = genomic DNA

SEQ ID NO: 62611 - DNA, 28 bp, Homo sapiens
  source 1..28: mol_type = genomic DNA
cgggcccataccccgaaaatgttggtta

SEQ ID NO: 62612 - DNA, 27 bp, Homo sapiens
  source 1..27: mol_type = genomic DNA
cgggcccataccccgaaaatgttggtt

SEQ ID NO: 62613 - DNA, 25 bp, Homo sapiens
  source 1..25: mol_type = genomic DNA
cgggcccataccccgaaaatgttgg

SEQ ID NO: 62614 - DNA, 18 bp, Homo sapiens
  source 1..18: mol_type = genomic DNA
cgggcccataccccgaaa

SEQ ID NO: 62615 - DNA, 36 bp, Homo sapiens; identical to SEQ ID NO: 12578
  source 1..36: mol_type = genomic DNA

SEQ ID NO: 62616 - DNA, 48 bp, Homo sapiens; identical to SEQ ID NO: 12483
  source 1..48: mol_type = genomic DNA

SEQ ID NO: 62617 - DNA, 23 bp, Homo sapiens
  source 1..23: mol_type = genomic DNA
cggcccgggttcgactcccggtg

SEQ ID NO: 62618 - DNA, 48 bp, Homo sapiens; identical to SEQ ID NO: 12371
  source 1..48: mol_type = genomic DNA

SEQ ID NO: 62619 - DNA, 29 bp, Homo sapiens
  source 1..29: mol_type = genomic DNA
cggaagcgtgctgggcccataacccagag

SEQ ID NO: 62620 - DNA, 29 bp, Homo sapiens
  source 1..29: mol_type = genomic DNA
cgctggttcgattccagctcgaaggacca

SEQ ID NO: 62621 - DNA, 45 bp, Homo sapiens; identical to SEQ ID NO: 12307
  source 1..45: mol_type = genomic DNA

SEQ ID NO: 62622 - DNA, 29 bp, Homo sapiens
  source 1..29: mol_type = genomic DNA
cgcgtgggttcgaaccccacttctggtac

SEQ ID NO: 62623 - DNA, 22 bp, Homo sapiens
  source 1..22: mol_type = genomic DNA
cgcgtcagtctcataatctgaa

SEQ ID NO: 62624 - DNA, 17 bp, Homo sapiens
  source 1..17: mol_type = genomic DNA
cgcgggttcgaaccccg

SEQ ID NO: 62625 - DNA, 38 bp, Homo sapiens; identical to SEQ ID NO: 12252
  source 1..38: mol_type = genomic DNA

SEQ ID NO: 62626 - DNA, 32 bp, Homo sapiens; identical to SEQ ID NO: 12248
  source 1..32: mol_type = genomic DNA

SEQ ID NO: 62627 - DNA, 31 bp, Homo sapiens; identical to SEQ ID NO: 12247
  source 1..31: mol_type = genomic DNA

SEQ ID NO: 62628 - DNA, 29 bp, Homo sapiens
  source 1..29: mol_type = genomic DNA
cgcgggagaccggggttcaattccccgac

SEQ ID NO: 62629 - DNA, 26 bp, Homo sapiens
  source 1..26: mol_type = genomic DNA
cgcgggagaccggggttcaattcccc

SEQ ID NO: 62630 - DNA, 28 bp, Homo sapiens
  source 1..28: mol_type = genomic DNA
cgcgagttcaattctcgctggggcctcc

SEQ ID NO: 62631 - DNA, 36 bp, Homo sapiens; identical to SEQ ID NO: 12156
  source 1..36: mol_type = genomic DNA

SEQ ID NO: 62632 - DNA, 48 bp, Homo sapiens; identical to SEQ ID NO: 12102
  source 1..48: mol_type = genomic DNA

SEQ ID NO: 62633 - DNA, 38 bp, Homo sapiens; identical to SEQ ID NO: 12098
  source 1..38: mol_type = genomic DNA

SEQ ID NO: 62634 - DNA, 27 bp, Homo sapiens
  source 1..27: mol_type = genomic DNA
cgccgcggcccgggttcgattcccggc

SEQ ID NO: 62635 - DNA, 30 bp, Homo sapiens; identical to SEQ ID NO: 12052
  source 1..30: mol_type = genomic DNA

SEQ ID NO: 62636 - DNA, 32 bp, Homo sapiens; identical to SEQ ID NO: 12032
  source 1..32: mol_type = genomic DNA

SEQ ID NO: 62637 - DNA, 19 bp, Homo sapiens
  source 1..19: mol_type = genomic DNA
cgcattggtggttcagtgg

SEQ ID NO: 62638 - DNA, 35 bp, Homo sapiens; identical to SEQ ID NO: 12001
  source 1..35: mol_type = genomic DNA

SEQ ID NO: 62639 - DNA, 34 bp, Homo sapiens; identical to SEQ ID NO: 12000
  source 1..34: mol_type = genomic DNA

SEQ ID NO: 62640 - DNA, 32 bp, Homo sapiens; identical to SEQ ID NO: 11993
  source 1..32: mol_type = genomic DNA

SEQ ID NO: 62641 - DNA, 28 bp, Homo sapiens
  source 1..28: mol_type = genomic DNA
cgcataaaacttaaaactttacagtcag

SEQ ID NO: 62642 - DNA, 23 bp, Homo sapiens
  source 1..23: mol_type = genomic DNA
cgcataaaacttaaaactttaca

SEQ ID NO: 62643 - DNA, 16 bp, Homo sapiens
  source 1..16: mol_type = genomic DNA
cgattcccggccaacg

SEQ ID NO: 62644 - DNA, 48 bp, Homo sapiens; identical to SEQ ID NO: 11909
  source 1..48: mol_type = genomic DNA

SEQ ID NO: 62645 - DNA, 37 bp, Homo sapiens; identical to SEQ ID NO: 11904
  source 1..37: mol_type = genomic DNA

SEQ ID NO: 62646 - DNA, 26 bp, Homo sapiens
  source 1..26: mol_type = genomic DNA
cgatggtttttcatatcattggtcgt

SEQ ID NO: 62647 - DNA, 23 bp, Homo sapiens
  source 1..23: mol_type = genomic DNA
cgatccgagttcaaatctcggtg

SEQ ID NO: 62648 - DNA, 25 bp, Homo sapiens
  source 1..25: mol_type = genomic DNA
cgaggtgattttcatattgaattgc

SEQ ID NO: 62649 - DNA, 16 bp, Homo sapiens
  source 1..16: mol_type = genomic DNA
cgactcccggtgtggg

SEQ ID NO: 62650 - DNA, 34 bp, Homo sapiens; identical to SEQ ID NO: 11753
  source 1..34: mol_type = genomic DNA

SEQ ID NO: 62651 - DNA, 23 bp, Homo sapiens
  source 1..23: mol_type = genomic DNA
cgaatgatttcgactcattaaat

SEQ ID NO: 62652 - DNA, 37 bp, Homo sapiens; identical to SEQ ID NO: 11661
  source 1..37: mol_type = genomic DNA

SEQ ID NO: 62653 - DNA, 18 bp, Homo sapiens
  source 1..18: mol_type = genomic DNA
cgaaaaagtcatggaggc

SEQ ID NO: 62654 - DNA, 48 bp, Homo sapiens; identical to SEQ ID NO: 11606
  source 1..48: mol_type = genomic DNA

SEQ ID NO: 62655 - DNA, 41 bp, Homo sapiens; identical to SEQ ID NO: 11549
  source 1..41: mol_type = genomic DNA

SEQ ID NO: 62656 - DNA, 32 bp, Homo sapiens; identical to SEQ ID NO: 11544
  source 1..32: mol_type = genomic DNA

SEQ ID NO: 62657 - DNA, 19 bp, Homo sapiens
  source 1..19: mol_type = genomic DNA
cctggtggtctagtggcta

SEQ ID NO: 62658 - DNA, 40 bp, Homo sapiens; identical to SEQ ID NO: 11417
  source 1..40: mol_type = genomic DNA

SEQ ID NO: 62659 - DNA, 23 bp, Homo sapiens
  source 1..23: mol_type = genomic DNA
cctcctcaaagcaatacactgaa

SEQ ID NO: 62660 - DNA, 32 bp, Homo sapiens; identical to SEQ ID NO: 11353
  source 1..32: mol_type = genomic DNA

SEQ ID NO: 62661 - DNA, 48 bp, Homo sapiens; identical to SEQ ID NO: 11342
  source 1..48: mol_type = genomic DNA

SEQ ID NO: 62662 - DNA, 30 bp, Homo sapiens; identical to SEQ ID NO: 11337
  source 1..30: mol_type = genomic DNA

SEQ ID NO: 62663 - DNA, 32 bp, Homo sapiens; identical to SEQ ID NO: 11333
  source 1..32: mol_type = genomic DNA

SEQ ID NO: 62664 - DNA, 29 bp, Homo sapiens
  source 1..29: mol_type = genomic DNA
ccgtagtggagtggttatcacgttcgcct

SEQ ID NO: 62665 - DNA, 23 bp, Homo sapiens
  source 1..23: mol_type = genomic DNA
ccggttcgatcccgggcggaaac

SEQ ID NO: 62666 - DNA, 18 bp, Homo sapiens
  source 1..18: mol_type = genomic DNA
ccggttcgaaaccgggcg

SEQ ID NO: 62667 - DNA, 26 bp, Homo sapiens
  source 1..26: mol_type = genomic DNA
ccgggttcgattcccgggcggcgcac

SEQ ID NO: 62668 - DNA, 16 bp, Homo sapiens
  source 1..16: mol_type = genomic DNA
ccggggttcgattccc

SEQ ID NO: 62669 - DNA, 21 bp, Homo sapiens
  source 1..21: mol_type = genomic DNA
ccggagatgaaaacctttttc

SEQ ID NO: 62670 - DNA, 19 bp, Homo sapiens
  source 1..19: mol_type = genomic DNA
ccggagatgaaaacctttt

SEQ ID NO: 62671 - DNA, 43 bp, Homo sapiens; identical to SEQ ID NO: 11022
  source 1..43: mol_type = genomic DNA

SEQ ID NO: 62672 - DNA, 37 bp, Homo sapiens; identical to SEQ ID NO: 10936
  source 1..37: mol_type = genomic DNA

SEQ ID NO: 62673 - DNA, 31 bp, Homo sapiens; identical to SEQ ID NO: 10931
  source 1..31: mol_type = genomic DNA

SEQ ID NO: 62674 - DNA, 37 bp, Homo sapiens; identical to SEQ ID NO: 10835
  source 1..37: mol_type = genomic DNA

SEQ ID NO: 62675 - DNA, 31 bp, Homo sapiens; identical to SEQ ID NO: 10815
  source 1..31: mol_type = genomic DNA

SEQ ID NO: 62676 - DNA, 48 bp, Homo sapiens; identical to SEQ ID NO: 10739
  source 1..48: mol_type = genomic DNA

SEQ ID NO: 62677 - DNA, 40 bp, Homo sapiens; identical to SEQ ID NO: 10736
  source 1..40: mol_type = genomic DNA

SEQ ID NO: 62678 - DNA, 34 bp, Homo sapiens; identical to SEQ ID NO: 10727
  source 1..34: mol_type = genomic DNA

SEQ ID NO: 62679 - DNA, 33 bp, Homo sapiens; identical to SEQ ID NO: 10726
  source 1..33: mol_type = genomic DNA

SEQ ID NO: 62680 - DNA, 32 bp, Homo sapiens; identical to SEQ ID NO: 10725
  source 1..32: mol_type = genomic DNA

SEQ ID NO: 62681 - DNA, 16 bp, Homo sapiens
  source 1..16: mol_type = genomic DNA
cccggccagggaacca

SEQ ID NO: 62682 - DNA, 32 bp, Homo sapiens; identical to SEQ ID NO: 10687
  source 1..32: mol_type = genomic DNA

SEQ ID NO: 62683 - DNA, 32 bp, Homo sapiens; identical to SEQ ID NO: 10683
  source 1..32: mol_type = genomic DNA

SEQ ID NO: 62684 - DNA, 48 bp, Homo sapiens; identical to SEQ ID NO: 10680
  source 1..48: mol_type = genomic DNA

SEQ ID NO: 62685 - DNA, 25 bp, Homo sapiens
  source 1..25: mol_type = genomic DNA
cccgaaaatgttggttatacccttc

SEQ ID NO: 62686 - DNA, 16 bp, Homo sapiens
  source 1..16: mol_type = genomic DNA
ccccgggttcaatccc

SEQ ID NO: 62687 - DNA, 34 bp, Homo sapiens; identical to SEQ ID NO: 10619
  source 1..34: mol_type = genomic DNA

SEQ ID NO: 62688 - DNA, 25 bp, Homo sapiens
  source 1..25: mol_type = genomic DNA
ccccgcgcaggttcgaatcctgccg

SEQ ID NO: 62689 - DNA, 37 bp, Homo sapiens; identical to SEQ ID NO: 10539
  source 1..37: mol_type = genomic DNA

SEQ ID NO: 62690 - DNA, 27 bp, Homo sapiens
  source 1..27: mol_type = genomic DNA
cccattcttgcgacccgggttcgattc

SEQ ID NO: 62691 - DNA, 39 bp, Homo sapiens; identical to SEQ ID NO: 10469
  source 1..39: mol_type = genomic DNA

SEQ ID NO: 62692 - DNA, 19 bp, Homo sapiens
  source 1..19: mol_type = genomic DNA
cccataccccgaaaatgtt

SEQ ID NO: 62693 - DNA, 35 bp, Homo sapiens; identical to SEQ ID NO: 10430
  source 1..35: mol_type = genomic DNA

SEQ ID NO: 62694 - DNA, 29 bp, Homo sapiens
  source 1..29: mol_type = genomic DNA
cccaggcggcccgggttcgactcccggtg

SEQ ID NO: 62695 - DNA, 42 bp, Homo sapiens; identical to SEQ ID NO: 10395
  source 1..42: mol_type = genomic DNA

SEQ ID NO: 62696 - DNA, 48 bp, Homo sapiens; identical to SEQ ID NO: 10367
  source 1..48: mol_type = genomic DNA

SEQ ID NO: 62697 - DNA, 42 bp, Homo sapiens; identical to SEQ ID NO: 10361
  source 1..42: mol_type = genomic DNA

SEQ ID NO: 62698 - DNA, 37 bp, Homo sapiens; identical to SEQ ID NO: 10338
  source 1..37: mol_type = genomic DNA

SEQ ID NO: 62699 - DNA, 18 bp, Homo sapiens
  source 1..18: mol_type = genomic DNA
ccatttcataactttgtc

SEQ ID NO: 62700 - DNA, 39 bp, Homo sapiens; identical to SEQ ID NO: 10310
  source 1..39: mol_type = genomic DNA

SEQ ID NO: 62701 - DNA, 25 bp, Homo sapiens
  source 1..25: mol_type = genomic DNA
ccagttgattagggtgcttagctgt

SEQ ID NO: 62702 - DNA, 26 bp, Homo sapiens
  source 1..26: mol_type = genomic DNA
ccagggttcaagtccctgttcaggcg

SEQ ID NO: 62703 - DNA, 25 bp, Homo sapiens
  source 1..25: mol_type = genomic DNA
ccagggttcaagtccctgttcaggc

SEQ ID NO: 62704 - DNA, 34 bp, Homo sapiens; identical to SEQ ID NO: 10140
  source 1..34: mol_type = genomic DNA

SEQ ID NO: 62705 - DNA, 17 bp, Homo sapiens
  source 1..17: mol_type = genomic DNA
ccagagtgtagcttaac

SEQ ID NO: 62706 - DNA, 48 bp, Homo sapiens; identical to SEQ ID NO: 10037
  source 1..48: mol_type = genomic DNA

SEQ ID NO: 62707 - DNA, 46 bp, Homo sapiens; identical to SEQ ID NO: 10036
  source 1..46: mol_type = genomic DNA

SEQ ID NO: 62708 - DNA, 32 bp, Homo sapiens; identical to SEQ ID NO: 10031
  source 1..32: mol_type = genomic DNA

SEQ ID NO: 62709 - DNA, 33 bp, Homo sapiens; identical to SEQ ID NO: 9964
  source 1..33: mol_type = genomic DNA

SEQ ID NO: 62710 - DNA, 31 bp, Homo sapiens; identical to SEQ ID NO: 9949
  source 1..31: mol_type = genomic DNA

SEQ ID NO: 62711 - DNA, 31 bp, Homo sapiens; identical to SEQ ID NO: 9943
  source 1..31: mol_type = genomic DNA

SEQ ID NO: 62712 - DNA, 36 bp, Homo sapiens; identical to SEQ ID NO: 9882
  source 1..36: mol_type = genomic DNA

SEQ ID NO: 62713 - DNA, 36 bp, Homo sapiens; identical to SEQ ID NO: 9862
  source 1..36: mol_type = genomic DNA

SEQ ID NO: 62714 - DNA, 42 bp, Homo sapiens; identical to SEQ ID NO: 9841
  source 1..42: mol_type = genomic DNA

SEQ ID NO: 62715 - DNA, 37 bp, Homo sapiens; identical to SEQ ID NO: 9836
  source 1..37: mol_type = genomic DNA

SEQ ID NO: 62716 - DNA, 39 bp, Homo sapiens; identical to SEQ ID NO: 9811
  source 1..39: mol_type = genomic DNA

SEQ ID NO: 62717 - DNA, 32 bp, Homo sapiens; identical to SEQ ID NO: 9799
  source 1..32: mol_type = genomic DNA

SEQ ID NO: 62718 - DNA, 23 bp, Homo sapiens
  source 1..23: mol_type = genomic DNA
cattggtcttaggccccaaaaat

SEQ ID NO: 62719 - DNA, 32 bp, Homo sapiens; identical to SEQ ID NO: 9722
  source 1..32: mol_type = genomic DNA

SEQ ID NO: 62720 - DNA, 34 bp, Homo sapiens; identical to SEQ ID NO: 9708
  source 1..34: mol_type = genomic DNA

SEQ ID NO: 62721 - DNA, 33 bp, Homo sapiens; identical to SEQ ID NO: 9684
  source 1..33: mol_type = genomic DNA

SEQ ID NO: 62722 - DNA, 32 bp, Homo sapiens; identical to SEQ ID NO: 9683
  source 1..32: mol_type = genomic DNA

SEQ ID NO: 62723 - DNA, 29 bp, Homo sapiens
  source 1..29: mol_type = genomic DNA
cattaaattatgataatcatatttaccaa

SEQ ID NO: 62724 - DNA, 23 bp, Homo sapiens
  source 1..23: mol_type = genomic DNA
catgtctaacaacatggctttct

SEQ ID NO: 62725 - DNA, 22 bp, Homo sapiens
  source 1..22: mol_type = genomic DNA
catgtctaacaacatggctttc

SEQ ID NO: 62726 - DNA, 26 bp, Homo sapiens
  source 1..26: mol_type = genomic DNA
catggtgtaatggtgagcactctgga

SEQ ID NO: 62727 - DNA, 17 bp, Homo sapiens
  source 1..17: mol_type = genomic DNA
catgggactcttaatct

SEQ ID NO: 62728 - DNA, 31 bp, Homo sapiens; identical to SEQ ID NO: 9580
  source 1..31: mol_type = genomic DNA

SEQ ID NO: 62729 - DNA, 40 bp, Homo sapiens; identical to SEQ ID NO: 9542
  source 1..40: mol_type = genomic DNA

SEQ ID NO: 62730 - DNA, 38 bp, Homo sapiens; identical to SEQ ID NO: 9540
  source 1..38: mol_type = genomic DNA

SEQ ID NO: 62731 - DNA, 33 bp, Homo sapiens; identical to SEQ ID NO: 9535
  source 1..33: mol_type = genomic DNA

SEQ ID NO: 62732 - DNA, 29 bp, Homo sapiens
  source 1..29: mol_type = genomic DNA
catcagattgtgaatctgacaacagaggc

SEQ ID NO: 62733 - DNA, 33 bp, Homo sapiens; identical to SEQ ID NO: 9511
  source 1..33: mol_type = genomic DNA

SEQ ID NO: 62734 - DNA, 25 bp, Homo sapiens
  source 1..25: mol_type = genomic DNA
catagtgtagcggttatcacgtctg

SEQ ID NO: 62735 - DNA, 37 bp, Homo sapiens; identical to SEQ ID NO: 9433
  source 1..37: mol_type = genomic DNA

SEQ ID NO: 62736 - DNA, 29 bp, Homo sapiens
  source 1..29: mol_type = genomic DNA
cataatctgaaggtcgtgagttcgagcct

SEQ ID NO: 62737 - DNA, 32 bp, Homo sapiens; identical to SEQ ID NO: 9396
  source 1..32: mol_type = genomic DNA

SEQ ID NO: 62738 - DNA, 29 bp, Homo sapiens
  source 1..29: mol_type = genomic DNA
cataaaacttaaaactttacagtcagagg

SEQ ID NO: 62739 - DNA, 27 bp, Homo sapiens
  source 1..27: mol_type = genomic DNA
cataaaacttaaaactttacagtcaga

SEQ ID NO: 62740 - DNA, 31 bp, Homo sapiens; identical to SEQ ID NO: 9340
  source 1..31: mol_type = genomic DNA

SEQ ID NO: 62741 - DNA, 29 bp, Homo sapiens
  source 1..29: mol_type = genomic DNA
cagttgacccgggttcgattcccggccaa

SEQ ID NO: 62742 - DNA, 36 bp, Homo sapiens; identical to SEQ ID NO: 9299
  source 1..36: mol_type = genomic DNA

SEQ ID NO: 62743 - DNA, 25 bp, Homo sapiens
  source 1..25: mol_type = genomic DNA
cagtggcctaatggataaggcattg

SEQ ID NO: 62744 - DNA, 40 bp, Homo sapiens; identical to SEQ ID NO: 9249
  source 1..40: mol_type = genomic DNA

SEQ ID NO: 62745 - DNA, 24 bp, Homo sapiens
  source 1..24: mol_type = genomic DNA
cagtctcataatctgaaggtcgtg

SEQ ID NO: 62746 - DNA, 17 bp, Homo sapiens
  source 1..17: mol_type = genomic DNA
cagtctcataatctgaa

SEQ ID NO: 62747 - DNA, 21 bp, Homo sapiens
  source 1..21: mol_type = genomic DNA
cagtcggtggagcatgggact

SEQ ID NO: 62748 - DNA, 30 bp, Homo sapiens; identical to SEQ ID NO: 9228
  source 1..30: mol_type = genomic DNA

SEQ ID NO: 62749 - DNA, 41 bp, Homo sapiens; identical to SEQ ID NO: 9223
  source 1..41: mol_type = genomic DNA

SEQ ID NO: 62750 - DNA, 37 bp, Homo sapiens; identical to SEQ ID NO: 9195
  source 1..37: mol_type = genomic DNA

SEQ ID NO: 62751 - DNA, 30 bp, Homo sapiens; identical to SEQ ID NO: 9182
  source 1..30: mol_type = genomic DNA

SEQ ID NO: 62752 - DNA, 27 bp, Homo sapiens
  source 1..27: mol_type = genomic DNA
cagtcggtagagcatgagacccttaat

SEQ ID NO: 62753 - DNA, 26 bp, Homo sapiens
  source 1..26: mol_type = genomic DNA
cagtcggtagagcatgagacccttaa

SEQ ID NO: 62754 - DNA, 24 bp, Homo sapiens
  source 1..24: mol_type = genomic DNA
cagtcggtagagcatgagaccctt

SEQ ID NO: 62755 - DNA, 23 bp, Homo sapiens
  source 1..23: mol_type = genomic DNA
cagtcggtagagcatgagaccct

SEQ ID NO: 62756 - DNA, 21 bp, Homo sapiens
  source 1..21: mol_type = genomic DNA
cagtcggtagagcataagact

SEQ ID NO: 62757 - DNA, 27 bp, Homo sapiens
  source 1..27: mol_type = genomic DNA
caggtggcccgggttcgactcccggta

SEQ ID NO: 62758 - DNA, 21 bp, Homo sapiens
  source 1..21: mol_type = genomic DNA
cagggtcgtgggttcgagccc

SEQ ID NO: 62759 - DNA, 19 bp, Homo sapiens
  source 1..19: mol_type = genomic DNA
caggcggcccgggttcgac

SEQ ID NO: 62760 - DNA, 27 bp, Homo sapiens
  source 1..27: mol_type = genomic DNA
caggatggccgagtggtctaaggcgcc

SEQ ID NO: 62761 - DNA, 30 bp, Homo sapiens; identical to SEQ ID NO: 8923
  source 1..30: mol_type = genomic DNA

SEQ ID NO: 62762 - DNA, 18 bp, Homo sapiens
  source 1..18: mol_type = genomic DNA
cagcttcaaacctgccgg

SEQ ID NO: 62763 - DNA, 31 bp, Homo sapiens; identical to SEQ ID NO: 8886
  source 1..31: mol_type = genomic DNA

SEQ ID NO: 62764 - DNA, 38 bp, Homo sapiens; identical to SEQ ID NO: 8860
  source 1..38: mol_type = genomic DNA

SEQ ID NO: 62765 - DNA, 29 bp, Homo sapiens
  source 1..29: mol_type = genomic DNA
cagcggaagcgtgctgggcccataaccca

SEQ ID NO: 62766 - DNA, 23 bp, Homo sapiens
  source 1..23: mol_type = genomic DNA
cagcgatccgagttcaaatctcg

SEQ ID NO: 62767 - DNA, 33 bp, Homo sapiens; identical to SEQ ID NO: 8819
  source 1..33: mol_type = genomic DNA

SEQ ID NO: 62768 - DNA, 30 bp, Homo sapiens; identical to SEQ ID NO: 8804
  source 1..30: mol_type = genomic DNA

SEQ ID NO: 62769 - DNA, 48 bp, Homo sapiens; identical to SEQ ID NO: 8801
  source 1..48: mol_type = genomic DNA

SEQ ID NO: 62770 - DNA, 45 bp, Homo sapiens; identical to SEQ ID NO: 8798
  source 1..45: mol_type = genomic DNA

SEQ ID NO: 62771 - DNA, 44 bp, Homo sapiens; identical to SEQ ID NO: 8797
  source 1..44: mol_type = genomic DNA

SEQ ID NO: 62772 - DNA, 43 bp, Homo sapiens; identical to SEQ ID NO: 8796
  source 1..43: mol_type = genomic DNA

SEQ ID NO: 62773 - DNA, 41 bp, Homo sapiens; identical to SEQ ID NO: 8794
  source 1..41: mol_type = genomic DNA

SEQ ID NO: 62774 - DNA, 40 bp, Homo sapiens; identical to SEQ ID NO: 8793
  source 1..40: mol_type = genomic DNA

SEQ ID NO: 62775 - DNA, 38 bp, Homo sapiens; identical to SEQ ID NO: 8791
  source 1..38: mol_type = genomic DNA

SEQ ID NO: 62776 - DNA, 34 bp, Homo sapiens; identical to SEQ ID NO: 8787
  source 1..34: mol_type = genomic DNA

SEQ ID NO: 62777 - DNA, 27 bp, Homo sapiens
  source 1..27: mol_type = genomic DNA
cagattgtgaatctgacaacagaggct

SEQ ID NO: 62778 - DNA, 25 bp, Homo sapiens
  source 1..25: mol_type = genomic DNA
cagattgtgaatctgacaacagagg

SEQ ID NO: 62779 - DNA, 48 bp, Homo sapiens; identical to SEQ ID NO: 8764
  source 1..48: mol_type = genomic DNA

SEQ ID NO: 62780 - DNA, 18 bp, Homo sapiens
  source 1..18: mol_type = genomic DNA
cagaggcttacgacccct

SEQ ID NO: 62781 - DNA, 48 bp, Homo sapiens; identical to SEQ ID NO: 8654
  source 1..48: mol_type = genomic DNA

SEQ ID NO: 62782 - DNA, 37 bp, Homo sapiens; identical to SEQ ID NO: 8558
  source 1..37: mol_type = genomic DNA

SEQ ID NO: 62783 - DNA, 33 bp, Homo sapiens; identical to SEQ ID NO: 8529
  source 1..33: mol_type = genomic DNA

SEQ ID NO: 62784 - DNA, 29 bp, Homo sapiens
  source 1..29: mol_type = genomic DNA
cactctggactttgaatccagcgatccga

SEQ ID NO: 62785 - DNA, 36 bp, Homo sapiens; identical to SEQ ID NO: 8433
  source 1..36: mol_type = genomic DNA

SEQ ID NO: 62786 - DNA, 30 bp, Homo sapiens; identical to SEQ ID NO: 8406
  source 1..30: mol_type = genomic DNA

SEQ ID NO: 62787 - DNA, 35 bp, Homo sapiens; identical to SEQ ID NO: 8391
  source 1..35: mol_type = genomic DNA

SEQ ID NO: 62788 - DNA, 37 bp, Homo sapiens; identical to SEQ ID NO: 8387
  source 1..37: mol_type = genomic DNA

SEQ ID NO: 62789 - DNA, 16 bp, Homo sapiens
  source 1..16: mol_type = genomic DNA
cacgcgggagaccggg

SEQ ID NO: 62790 - DNA, 31 bp, Homo sapiens; identical to SEQ ID NO: 8342
  source 1..31: mol_type = genomic DNA

SEQ ID NO: 62791 - DNA, 31 bp, Homo sapiens; identical to SEQ ID NO: 8322
  source 1..31: mol_type = genomic DNA

SEQ ID NO: 62792 - DNA, 30 bp, Homo sapiens; identical to SEQ ID NO: 8321
  source 1..30: mol_type = genomic DNA

SEQ ID NO: 62793 - DNA, 31 bp, Homo sapiens; identical to SEQ ID NO: 8301
  source 1..31: mol_type = genomic DNA

SEQ ID NO: 62794 - DNA, 48 bp, Homo sapiens; identical to SEQ ID NO: 8259
  source 1..48: mol_type = genomic DNA

SEQ ID NO: 62795 - DNA, 33 bp, Homo sapiens; identical to SEQ ID NO: 8249
  source 1..33: mol_type = genomic DNA

SEQ ID NO: 62796 - DNA, 31 bp, Homo sapiens; identical to SEQ ID NO: 8247
  source 1..31: mol_type = genomic DNA

SEQ ID NO: 62797 - DNA, 47 bp, Homo sapiens; identical to SEQ ID NO: 8235
  source 1..47: mol_type = genomic DNA

SEQ ID NO: 62798 - DNA, 46 bp, Homo sapiens; identical to SEQ ID NO: 8234
  source 1..46: mol_type = genomic DNA

SEQ ID NO: 62799 - DNA, 32 bp, Homo sapiens; identical to SEQ ID NO: 8204
  source 1..32: mol_type = genomic DNA

SEQ ID NO: 62800 - DNA, 20 bp, Homo sapiens
  source 1..20: mol_type = genomic DNA
caattcctcttcttaacacc

SEQ ID NO: 62801 - DNA, 20 bp, Homo sapiens
  source 1..20: mol_type = genomic DNA
caattaactagttttgacaa

SEQ ID NO: 62802 - DNA, 18 bp, Homo sapiens
  source 1..18: mol_type = genomic DNA
caattaactagttttgac

SEQ ID NO: 62803 - DNA, 33 bp, Homo sapiens; identical to SEQ ID NO: 8120
  source 1..33: mol_type = genomic DNA

SEQ ID NO: 62804 - DNA, 25 bp, Homo sapiens
  source 1..25: mol_type = genomic DNA
caatacactgaaaatgtttagacgg

SEQ ID NO: 62805 - DNA, 34 bp, Homo sapiens; identical to SEQ ID NO: 8039
  source 1..34: mol_type = genomic DNA

SEQ ID NO: 62806 - DNA, 36 bp, Homo sapiens; identical to SEQ ID NO: 8028
  source 1..36: mol_type = genomic DNA

SEQ ID NO: 62807 - DNA, 35 bp, Homo sapiens; identical to SEQ ID NO: 8027
  source 1..35: mol_type = genomic DNA

SEQ ID NO: 62808 - DNA, 28 bp, Homo sapiens
  source 1..28: mol_type = genomic DNA
caagcagttgacccgggttcgattcccg

SEQ ID NO: 62809 - DNA, 38 bp, Homo sapiens; identical to SEQ ID NO: 7987
  source 1..38: mol_type = genomic DNA

SEQ ID NO: 62810 - DNA, 48 bp, Homo sapiens; identical to SEQ ID NO: 7916
  source 1..48: mol_type = genomic DNA

SEQ ID NO: 62811 - DNA, 39 bp, Homo sapiens; identical to SEQ ID NO: 7866
  source 1..39: mol_type = genomic DNA

SEQ ID NO: 62812 - DNA, 20 bp, Homo sapiens
  source 1..20: mol_type = genomic DNA
caaattcgaagaagcagctt

SEQ ID NO: 62813 - DNA, 38 bp, Homo sapiens; identical to SEQ ID NO: 7804
  source 1..38: mol_type = genomic DNA

SEQ ID NO: 62814 - DNA, 35 bp, Homo sapiens; identical to SEQ ID NO: 7801
  source 1..35: mol_type = genomic DNA

SEQ ID NO: 62815 - DNA, 34 bp, Homo sapiens; identical to SEQ ID NO: 7777
  source 1..34: mol_type = genomic DNA

SEQ ID NO: 62816 - DNA, 32 bp, Homo sapiens; identical to SEQ ID NO: 7775
  source 1..32: mol_type = genomic DNA

SEQ ID NO: 62817 - DNA, 48 bp, Homo sapiens; identical to SEQ ID NO: 7748
  source 1..48: mol_type = genomic DNA

SEQ ID NO: 62818 - DNA, 17 bp, Homo sapiens
  source 1..17: mol_type = genomic DNA
caaaaattttggtgcaa

SEQ ID NO: 62819 - DNA, 28 bp, Homo sapiens
  source 1..28: mol_type = genomic DNA
attttggtgcaactccaaataaaagtac

SEQ ID NO: 62820 - DNA, 44 bp, Homo sapiens; identical to SEQ ID NO: 7693
  source 1..44: mol_type = genomic DNA

SEQ ID NO: 62821 - DNA, 24 bp, Homo sapiens
  source 1..24: mol_type = genomic DNA
attttcatattgaattgcaaattc

SEQ ID NO: 62822 - DNA, 17 bp, Homo sapiens
  source 1..17: mol_type = genomic DNA
atttgcgttcagttgat

SEQ ID NO: 62823 - DNA, 27 bp, Homo sapiens
  source 1..27: mol_type = genomic DNA
atttaggttaaatacagaccaagagcc

SEQ ID NO: 62824 - DNA, 20 bp, Homo sapiens
  source 1..20: mol_type = genomic DNA
atttaggttaaatacagacc

SEQ ID NO: 62825 - DNA, 38 bp, Homo sapiens; identical to SEQ ID NO: 7604
  source 1..38: mol_type = genomic DNA

SEQ ID NO: 62826 - DNA, 48 bp, Homo sapiens; identical to SEQ ID NO: 7580
  source 1..48: mol_type = genomic DNA

SEQ ID NO: 62827 - DNA, 44 bp, Homo sapiens; identical to SEQ ID NO: 7576
  source 1..44: mol_type = genomic DNA

SEQ ID NO: 62828 - DNA, 41 bp, Homo sapiens; identical to SEQ ID NO: 7573
  source 1..41: mol_type = genomic DNA

SEQ ID NO: 62829 - DNA, 37 bp, Homo sapiens; identical to SEQ ID NO: 7569
  source 1..37: mol_type = genomic DNA

SEQ ID NO: 62830 - DNA, 34 bp, Homo sapiens; identical to SEQ ID NO: 7561
  source 1..34: mol_type = genomic DNA

SEQ ID NO: 62831 - DNA, 17 bp, Homo sapiens
  source 1..17: mol_type = genomic DNA
attggtcttaggcccca

SEQ ID NO: 62832 - DNA, 48 bp, Homo sapiens; identical to SEQ ID NO: 7509
  source 1..48: mol_type = genomic DNA

SEQ ID NO: 62833 - DNA, 42 bp, Homo sapiens; identical to SEQ ID NO: 7485
  source 1..42: mol_type = genomic DNA

SEQ ID NO: 62834 - DNA, 17 bp, Homo sapiens
  source 1..17: mol_type = genomic DNA
attctcgctggggcctc

SEQ ID NO: 62835 - DNA, 37 bp, Homo sapiens; identical to SEQ ID NO: 7426
  source 1..37: mol_type = genomic DNA

SEQ ID NO: 62836 - DNA, 39 bp, Homo sapiens; identical to SEQ ID NO: 7404
  source 1..39: mol_type = genomic DNA

SEQ ID NO: 62837 - DNA, 38 bp, Homo sapiens; identical to SEQ ID NO: 7403
  source 1..38: mol_type = genomic DNA

SEQ ID NO: 62838 - DNA, 32 bp, Homo sapiens; identical to SEQ ID NO: 7379
  source 1..32: mol_type = genomic DNA

SEQ ID NO: 62839 - DNA, 18 bp, Homo sapiens
  source 1..18: mol_type = genomic DNA
attcccggccagggaacc

SEQ ID NO: 62840 - DNA, 48 bp, Homo sapiens; identical to SEQ ID NO: 7292
  source 1..48: mol_type = genomic DNA

SEQ ID NO: 62841 - DNA, 18 bp, Homo sapiens
  source 1..18: mol_type = genomic DNA
attaactagttttgacaa

SEQ ID NO: 62842 - DNA, 18 bp, Homo sapiens
  source 1..18: mol_type = genomic DNA
atggtgtaatggttagca

SEQ ID NO: 62843 - DNA, 31 bp, Homo sapiens; identical to SEQ ID NO: 7053
  source 1..31: mol_type = genomic DNA

SEQ ID NO: 62844 - DNA, 28 bp, Homo sapiens
  source 1..28: mol_type = genomic DNA
atgggttcgattctcatagtcctagcca

SEQ ID NO: 62845 - DNA, 27 bp, Homo sapiens
  source 1..27: mol_type = genomic DNA
atgggttcgattctcatagtcctagcc

SEQ ID NO: 62846 - DNA, 41 bp, Homo sapiens; identical to SEQ ID NO: 7006
  source 1..41: mol_type = genomic DNA

SEQ ID NO: 62847 - DNA, 31 bp, Homo sapiens; identical to SEQ ID NO: 6977
  source 1..31: mol_type = genomic DNA

SEQ ID NO: 62848 - DNA, 37 bp, Homo sapiens; identical to SEQ ID NO: 6876
  source 1..37: mol_type = genomic DNA

SEQ ID NO: 62849 - DNA, 24 bp, Homo sapiens
  source 1..24: mol_type = genomic DNA
atgccgaggttgtgagttcgatcc

SEQ ID NO: 62850 - DNA, 19 bp, Homo sapiens
  source 1..19: mol_type = genomic DNA
atgcccccatgtctaacaa

SEQ ID NO: 62851 - DNA, 48 bp, Homo sapiens; identical to SEQ ID NO: 6769
  source 1..48: mol_type = genomic DNA

SEQ ID NO: 62852 - DNA, 44 bp, Homo sapiens; identical to SEQ ID NO: 6768
  source 1..44: mol_type = genomic DNA

SEQ ID NO: 62853 - DNA, 33 bp, Homo sapiens; identical to SEQ ID NO: 6748
  source 1..33: mol_type = genomic DNA

SEQ ID NO: 62854 - DNA, 34 bp, Homo sapiens; identical to SEQ ID NO: 6736
  source 1..34: mol_type = genomic DNA

SEQ ID NO: 62855 - DNA, 37 bp, Homo sapiens; identical to SEQ ID NO: 6717
  source 1..37: mol_type = genomic DNA

SEQ ID NO: 62856 - DNA, 43 bp, Homo sapiens; identical to SEQ ID NO: 6646
  source 1..43: mol_type = genomic DNA

SEQ ID NO: 62857 - DNA, 48 bp, Homo sapiens; identical to SEQ ID NO: 6628
  source 1..48: mol_type = genomic DNA

SEQ ID NO: 62858 - DNA, 31 bp, Homo sapiens; identical to SEQ ID NO: 6623
  source 1..31: mol_type = genomic DNA

SEQ ID NO: 62859 - DNA, 30 bp, Homo sapiens; identical to SEQ ID NO: 6622
  source 1..30: mol_type = genomic DNA

SEQ ID NO: 62860 - DNA, 27 bp, Homo sapiens
  source 1..27: mol_type = genomic DNA
atcgggcccataccccgaaaatgttgg

SEQ ID NO: 62861 - DNA, 21 bp, Homo sapiens
  source 1..21: mol_type = genomic DNA
atcgggcccataccccgaaaa

SEQ ID NO: 62862 - DNA, 48 bp, Homo sapiens; identical to SEQ ID NO: 6485
  source 1..48: mol_type = genomic DNA

SEQ ID NO: 62863 - DNA, 48 bp, Homo sapiens; identical to SEQ ID NO: 54722
  source 1..48: mol_type = genomic DNA

SEQ ID NO: 62864 - DNA, 16 bp, Homo sapiens
  source 1..16: mol_type = genomic DNA
atccaatggacatatg

SEQ ID NO: 62865 - DNA, 35 bp, Homo sapiens; identical to SEQ ID NO: 6409
  source 1..35: mol_type = genomic DNA

SEQ ID NO: 62866 - DNA, 42 bp, Homo sapiens; identical to SEQ ID NO: 6380
  source 1..42: mol_type = genomic DNA

SEQ ID NO: 62867 - DNA, 32 bp, Homo sapiens; identical to SEQ ID NO: 6370
  source 1..32: mol_type = genomic DNA

SEQ ID NO: 62868 - DNA, 29 bp, Homo sapiens
  source 1..29: mol_type = genomic DNA
atcagattgtgaatctgacaacagaggct

SEQ ID NO: 62869 - DNA, 17 bp, Homo sapiens
  source 1..17: mol_type = genomic DNA
atcagattgtgaatctg

SEQ ID NO: 62870 - DNA, 33 bp, Homo sapiens; identical to SEQ ID NO: 6349
  source 1..33: mol_type = genomic DNA

SEQ ID NO: 62871 - DNA, 36 bp, Homo sapiens; identical to SEQ ID NO: 6344
  source 1..36: mol_type = genomic DNA

SEQ ID NO: 62872 - DNA, 33 bp, Homo sapiens; identical to SEQ ID NO: 6322
  source 1..33: mol_type = genomic DNA

SEQ ID NO: 62873 - DNA, 27 bp, Homo sapiens
  source 1..27: mol_type = genomic DNA
atcagaagattctaggttcgactcctg

SEQ ID NO: 62874 - DNA, 23 bp, Homo sapiens
  source 1..23: mol_type = genomic DNA
atcagaagattccaggttcgact

SEQ ID NO: 62875 - DNA, 21 bp, Homo sapiens
  source 1..21: mol_type = genomic DNA
atcacgtctgctttacacgca

SEQ ID NO: 62876 - DNA, 29 bp, Homo sapiens
  source 1..29: mol_type = genomic DNA
atattgaattgcaaattcgaagaagcagc

SEQ ID NO: 62877 - DNA, 28 bp, Homo sapiens
  source 1..28: mol_type = genomic DNA
atatagtttaaccaaaacatcagattgt

SEQ ID NO: 62878 - DNA, 25 bp, Homo sapiens
  source 1..25: mol_type = genomic DNA
atagtggtgagcatagctgccttcc

SEQ ID NO: 62879 - DNA, 22 bp, Homo sapiens
  source 1..22: mol_type = genomic DNA
atagtaccgttaacttccaatt

SEQ ID NO: 62880 - DNA, 16 bp, Homo sapiens
  source 1..16: mol_type = genomic DNA
atagctcagtggtaga

SEQ ID NO: 62881 - DNA, 20 bp, Homo sapiens
  source 1..20: mol_type = genomic DNA
atagctcaggggttagagca

SEQ ID NO: 62882 - DNA, 21 bp, Homo sapiens
  source 1..21: mol_type = genomic DNA
atagcgcattggacttctaat

SEQ ID NO: 62883 - DNA, 32 bp, Homo sapiens; identical to SEQ ID NO: 6013
  source 1..32: mol_type = genomic DNA

SEQ ID NO: 62884 - DNA, 20 bp, Homo sapiens
  source 1..20: mol_type = genomic DNA
atacaacgatggtttttcat

SEQ ID NO: 62885 - DNA, 42 bp, Homo sapiens; identical to SEQ ID NO: 5969
  source 1..42: mol_type = genomic DNA

SEQ ID NO: 62886 - DNA, 30 bp, Homo sapiens; identical to SEQ ID NO: 5933
  source 1..30: mol_type = genomic DNA

SEQ ID NO: 62887 - DNA, 27 bp, Homo sapiens
  source 1..27: mol_type = genomic DNA
ataagctatcgggcccataccccgaaa

SEQ ID NO: 62888 - DNA, 25 bp, Homo sapiens
  source 1..25: mol_type = genomic DNA
ataagctatcgggcccataccccga

SEQ ID NO: 62889 - DNA, 25 bp, Homo sapiens
  source 1..25: mol_type = genomic DNA
ataaaacttaaaactttacagtcag

SEQ ID NO: 62890 - DNA, 40 bp, Homo sapiens; identical to SEQ ID NO: 5855
  source 1..40: mol_type = genomic DNA

SEQ ID NO: 62891 - DNA, 34 bp, Homo sapiens; identical to SEQ ID NO: 5852
  source 1..34: mol_type = genomic DNA

SEQ ID NO: 62892 - DNA, 27 bp, Homo sapiens
  source 1..27: mol_type = genomic DNA
agtttaaacaaaacgaatgatttcgac

SEQ ID NO: 62893 - DNA, 31 bp, Homo sapiens; identical to SEQ ID NO: 5784
  source 1..31: mol_type = genomic DNA

SEQ ID NO: 62894 - DNA, 17 bp, Homo sapiens
  source 1..17: mol_type = genomic DNA
agttgatgcagagtggg

SEQ ID NO: 62895 - DNA, 28 bp, Homo sapiens
  source 1..28: mol_type = genomic DNA
agttctggtctccggatggaggcgtggg

SEQ ID NO: 62896 - DNA, 27 bp, Homo sapiens
  source 1..27: mol_type = genomic DNA
agtggttaggattcggcgctctcaccg

SEQ ID NO: 62897 - DNA, 19 bp, Homo sapiens
  source 1..19: mol_type = genomic DNA
agtggttaaggcgttggac

SEQ ID NO: 62898 - DNA, 20 bp, Homo sapiens
  source 1..20: mol_type = genomic DNA
agtggtcatcacgttcgcct

SEQ ID NO: 62899 - DNA, 16 bp, Homo sapiens
  source 1..16: mol_type = genomic DNA
agtggctaggattcgg

SEQ ID NO: 62900 - DNA, 23 bp, Homo sapiens
  source 1..23: mol_type = genomic DNA
agtctcttcggaggcgtgggttc

SEQ ID NO: 62901 - DNA, 27 bp, Homo sapiens
  source 1..27: mol_type = genomic DNA
agtctcataatctgaaggtcctgagtt

SEQ ID NO: 62902 - DNA, 19 bp, Homo sapiens
  source 1..19: mol_type = genomic DNA
agtcggtggagcatgggac

SEQ ID NO: 62903 - DNA, 28 bp, Homo sapiens
  source 1..28: mol_type = genomic DNA
agtcggtagagcatgggactcttaatct

SEQ ID NO: 62904 - DNA, 37 bp, Homo sapiens; identical to SEQ ID NO: 5442
  source 1..37: mol_type = genomic DNA

SEQ ID NO: 62905 - DNA, 28 bp, Homo sapiens
  source 1..28: mol_type = genomic DNA
agtcggtagagcatgagacccttaatct

SEQ ID NO: 62906 - DNA, 26 bp, Homo sapiens
  source 1..26: mol_type = genomic DNA
agtcggtagagcatgagacccttaat

SEQ ID NO: 62907 - DNA, 25 bp, Homo sapiens
  source 1..25: mol_type = genomic DNA
agtcggtagagcatgagacccttaa

SEQ ID NO: 62908 - DNA, 22 bp, Homo sapiens
  source 1..22: mol_type = genomic DNA
agtcggtagagcatgagaccct

SEQ ID NO: 62909 - DNA, 20 bp, Homo sapiens
  source 1..20: mol_type = genomic DNA
agtcggtagagcatgagacc

SEQ ID NO: 62910 - DNA, 27 bp, Homo sapiens
  source 1..27: mol_type = genomic DNA
agtaagttgcaatacttaatttctgcc

SEQ ID NO: 62911 - DNA, 25 bp, Homo sapiens
  source 1..25: mol_type = genomic DNA
aggttcgactcctggctggctcgcc

SEQ ID NO: 62912 - DNA, 26 bp, Homo sapiens
  source 1..26: mol_type = genomic DNA
aggtggcccgggttcgactcccggta

SEQ ID NO: 62913 - DNA, 40 bp, Homo sapiens; identical to SEQ ID NO: 5200
  source 1..40: mol_type = genomic DNA

SEQ ID NO: 62914 - DNA, 32 bp, Homo sapiens; identical to SEQ ID NO: 5146
  source 1..32: mol_type = genomic DNA

SEQ ID NO: 62915 - DNA, 48 bp, Homo sapiens; identical to SEQ ID NO: 5129
  source 1..48: mol_type = genomic DNA

SEQ ID NO: 62916 - DNA, 47 bp, Homo sapiens; identical to SEQ ID NO: 5128
  source 1..47: mol_type = genomic DNA

SEQ ID NO: 62917 - DNA, 29 bp, Homo sapiens
  source 1..29: mol_type = genomic DNA
agggtcgtgggttcgagccccacgttggg

SEQ ID NO: 62918 - DNA, 35 bp, Homo sapiens; identical to SEQ ID NO: 4954
  source 1..35: mol_type = genomic DNA

SEQ ID NO: 62919 - DNA, 27 bp, Homo sapiens
  source 1..27: mol_type = genomic DNA
aggcatcagcctccggagctggggatt

SEQ ID NO: 62920 - DNA, 35 bp, Homo sapiens; identical to SEQ ID NO: 4895
  source 1..35: mol_type = genomic DNA

SEQ ID NO: 62921 - DNA, 32 bp, Homo sapiens; identical to SEQ ID NO: 4892
  source 1..32: mol_type = genomic DNA

SEQ ID NO: 62922 - DNA, 20 bp, Homo sapiens
  source 1..20: mol_type = genomic DNA
aggatggggtgtgataggtg

SEQ ID NO: 62923 - DNA, 34 bp, Homo sapiens; identical to SEQ ID NO: 4795
  source 1..34: mol_type = genomic DNA

SEQ ID NO: 62924 - DNA, 31 bp, Homo sapiens; identical to SEQ ID NO: 4792
  source 1..31: mol_type = genomic DNA

SEQ ID NO: 62925 - DNA, 16 bp, Homo sapiens
  source 1..16: mol_type = genomic DNA
agcttcaaacctgccg

SEQ ID NO: 62926 - DNA, 42 bp, Homo sapiens; identical to SEQ ID NO: 4739
  source 1..42: mol_type = genomic DNA

SEQ ID NO: 62927 - DNA, 29 bp, Homo sapiens
  source 1..29: mol_type = genomic DNA
agctgttaactaagtgtttgtgggtttaa

SEQ ID NO: 62928 - DNA, 19 bp, Homo sapiens
  source 1..19: mol_type = genomic DNA
agctgttaactaagtgttt

SEQ ID NO: 62929 - DNA, 48 bp, Homo sapiens; identical to SEQ ID NO: 4702
  source 1..48: mol_type = genomic DNA

SEQ ID NO: 62930 - DNA, 38 bp, Homo sapiens; identical to SEQ ID NO: 4693
  source 1..38: mol_type = genomic DNA

SEQ ID NO: 62931 - DNA, 33 bp, Homo sapiens; identical to SEQ ID NO: 4660
  source 1..33: mol_type = genomic DNA

SEQ ID NO: 62932 - DNA, 33 bp, Homo sapiens; identical to SEQ ID NO: 4645
  source 1..33: mol_type = genomic DNA

SEQ ID NO: 62933 - DNA, 27 bp, Homo sapiens
  source 1..27: mol_type = genomic DNA
agctcagtcggtagagcatgagaccct

SEQ ID NO: 62934 - DNA, 26 bp, Homo sapiens
  source 1..26: mol_type = genomic DNA
agctcagtcggtagagcatgagaccc

SEQ ID NO: 62935 - DNA, 25 bp, Homo sapiens
  source 1..25: mol_type = genomic DNA
agctcagtcggtagagcatgagacc

SEQ ID NO: 62936 - DNA, 45 bp, Homo sapiens; identical to SEQ ID NO: 4616
  source 1..45: mol_type = genomic DNA

SEQ ID NO: 62937 - DNA, 29 bp, Homo sapiens
  source 1..29: mol_type = genomic DNA
agctcacaagaactgctaactcatgcccc

SEQ ID NO: 62938 - DNA, 35 bp, Homo sapiens; identical to SEQ ID NO: 4584
  source 1..35: mol_type = genomic DNA

SEQ ID NO: 62939 - DNA, 34 bp, Homo sapiens; identical to SEQ ID NO: 4583
  source 1..34: mol_type = genomic DNA

SEQ ID NO: 62940 - DNA, 31 bp, Homo sapiens; identical to SEQ ID NO: 4580
  source 1..31: mol_type = genomic DNA

SEQ ID NO: 62941 - DNA, 17 bp, Homo sapiens
  source 1..17: mol_type = genomic DNA
agctatcgggcccatac

SEQ ID NO: 62942 - DNA, 40 bp, Homo sapiens; identical to SEQ ID NO: 4553
  source 1..40: mol_type = genomic DNA

SEQ ID NO: 62943 - DNA, 24 bp, Homo sapiens
  source 1..24: mol_type = genomic DNA
agcgtgctgggcccataacccaga

SEQ ID NO: 62944 - DNA, 21 bp, Homo sapiens
  source 1..21: mol_type = genomic DNA
agcgtgctgggcccataaccc

SEQ ID NO: 62945 - DNA, 21 bp, Homo sapiens
  source 1..21: mol_type = genomic DNA
agcgcattggacttctaattc

SEQ ID NO: 62946 - DNA, 30 bp, Homo sapiens; identical to SEQ ID NO: 4432
  source 1..30: mol_type = genomic DNA

SEQ ID NO: 62947 - DNA, 34 bp, Homo sapiens; identical to SEQ ID NO: 4416
  source 1..34: mol_type = genomic DNA

SEQ ID NO: 62948 - DNA, 31 bp, Homo sapiens; identical to SEQ ID NO: 4382
  source 1..31: mol_type = genomic DNA

SEQ ID NO: 62949 - DNA, 31 bp, Homo sapiens; identical to SEQ ID NO: 4348
  source 1..31: mol_type = genomic DNA

SEQ ID NO: 62950 - DNA, 29 bp, Homo sapiens
  source 1..29: mol_type = genomic DNA
agcatgggactcttaatcccagggtcgtg

SEQ ID NO: 62951 - DNA, 36 bp, Homo sapiens; identical to SEQ ID NO: 4317
  source 1..36: mol_type = genomic DNA

SEQ ID NO: 62952 - DNA, 30 bp, Homo sapiens; identical to SEQ ID NO: 4306
  source 1..30: mol_type = genomic DNA

SEQ ID NO: 62953 - DNA, 27 bp, Homo sapiens
  source 1..27: mol_type = genomic DNA
agcagcttcaaacctgccggggcttcc

SEQ ID NO: 62954 - DNA, 26 bp, Homo sapiens
  source 1..26: mol_type = genomic DNA
agcagcttcaaacctgccggggcttc

SEQ ID NO: 62955 - DNA, 25 bp, Homo sapiens
  source 1..25: mol_type = genomic DNA
agcagcttcaaacctgccggggctt

SEQ ID NO: 62956 - DNA, 31 bp, Homo sapiens; identical to SEQ ID NO: 4260
  source 1..31: mol_type = genomic DNA

SEQ ID NO: 62957 - DNA, 29 bp, Homo sapiens
  source 1..29: mol_type = genomic DNA
agcactctggactttgaatccagcgatcc

SEQ ID NO: 62958 - DNA, 36 bp, Homo sapiens; identical to SEQ ID NO: 4247
  source 1..36: mol_type = genomic DNA

SEQ ID NO: 62959 - DNA, 48 bp, Homo sapiens; identical to SEQ ID NO: 4219
  source 1..48: mol_type = genomic DNA

SEQ ID NO: 62960 - DNA, 46 bp, Homo sapiens; identical to SEQ ID NO: 4217
  source 1..46: mol_type = genomic DNA

SEQ ID NO: 62961 - DNA, 33 bp, Homo sapiens; identical to SEQ ID NO: 4212
  source 1..33: mol_type = genomic DNA

SEQ ID NO: 62962 - DNA, 32 bp, Homo sapiens; identical to SEQ ID NO: 4211
  source 1..32: mol_type = genomic DNA

SEQ ID NO: 62963 - DNA, 27 bp, Homo sapiens
  source 1..27: mol_type = genomic DNA
agcaatacactgaaaatgtttagacgg

SEQ ID NO: 62964 - DNA, 41 bp, Homo sapiens; identical to SEQ ID NO: 4159
  source 1..41: mol_type = genomic DNA

SEQ ID NO: 62965 - DNA, 40 bp, Homo sapiens; identical to SEQ ID NO: 4158
  source 1..40: mol_type = genomic DNA

SEQ ID NO: 62966 - DNA, 28 bp, Homo sapiens
  source 1..28: mol_type = genomic DNA
agattgtgaatctgacaacagaggctta

SEQ ID NO: 62967 - DNA, 18 bp, Homo sapiens
  source 1..18: mol_type = genomic DNA
agattgcaggttcgagtc

SEQ ID NO: 62968 - DNA, 46 bp, Homo sapiens; identical to SEQ ID NO: 4104
  source 1..46: mol_type = genomic DNA

SEQ ID NO: 62969 - DNA, 24 bp, Homo sapiens
  source 1..24: mol_type = genomic DNA
agattaagagaaccaacacctctt

SEQ ID NO: 62970 - DNA, 27 bp, Homo sapiens
  source 1..27: mol_type = genomic DNA
agatcctgggttcgaatcccagcggtg

SEQ ID NO: 62971 - DNA, 41 bp, Homo sapiens; identical to SEQ ID NO: 4046
  source 1..41: mol_type = genomic DNA

SEQ ID NO: 62972 - DNA, 37 bp, Homo sapiens; identical to SEQ ID NO: 4043
  source 1..37: mol_type = genomic DNA

SEQ ID NO: 62973 - DNA, 25 bp, Homo sapiens
  source 1..25: mol_type = genomic DNA
agagtgtagcttaacacaaagcacc

SEQ ID NO: 62974 - DNA, 16 bp, Homo sapiens
  source 1..16: mol_type = genomic DNA
agaggtccctggttca

SEQ ID NO: 62975 - DNA, 28 bp, Homo sapiens
  source 1..28: mol_type = genomic DNA
agagccttcaaagccctcagtaagttgc

SEQ ID NO: 62976 - DNA, 21 bp, Homo sapiens
  source 1..21: mol_type = genomic DNA
agagccagactgcctgggttt

SEQ ID NO: 62977 - DNA, 32 bp, Homo sapiens; identical to SEQ ID NO: 3921
  source 1..32: mol_type = genomic DNA

SEQ ID NO: 62978 - DNA, 32 bp, Homo sapiens; identical to SEQ ID NO: 3911
  source 1..32: mol_type = genomic DNA

SEQ ID NO: 62979 - DNA, 19 bp, Homo sapiens
  source 1..19: mol_type = genomic DNA
agagaaccaacacctcttt

SEQ ID NO: 62980 - DNA, 16 bp, Homo sapiens
  source 1..16: mol_type = genomic DNA
agacaggggttaggcc

SEQ ID NO: 62981 - DNA, 42 bp, Homo sapiens; identical to SEQ ID NO: 3816
  source 1..42: mol_type = genomic DNA

SEQ ID NO: 62982 - DNA, 40 bp, Homo sapiens; identical to SEQ ID NO: 3675
  source 1..40: mol_type = genomic DNA

SEQ ID NO: 62983 - DNA, 34 bp, Homo sapiens; identical to SEQ ID NO: 3673
  source 1..34: mol_type = genomic DNA

SEQ ID NO: 62984 - DNA, 25 bp, Homo sapiens
  source 1..25: mol_type = genomic DNA
agaaatttaggttaaatacagacca

SEQ ID NO: 62985 - DNA, 48 bp, Homo sapiens; identical to SEQ ID NO: 3662
  source 1..48: mol_type = genomic DNA

SEQ ID NO: 62986 - DNA, 35 bp, Homo sapiens; identical to SEQ ID NO: 3654
  source 1..35: mol_type = genomic DNA

SEQ ID NO: 62987 - DNA, 48 bp, Homo sapiens; identical to SEQ ID NO: 3634
  source 1..48: mol_type = genomic DNA

SEQ ID NO: 62988 - DNA, 41 bp, Homo sapiens; identical to SEQ ID NO: 3627
  source 1..41: mol_type = genomic DNA

SEQ ID NO: 62989 - DNA, 33 bp, Homo sapiens; identical to SEQ ID NO: 3620
  source 1..33: mol_type = genomic DNA

SEQ ID NO: 62990 - DNA, 26 bp, Homo sapiens
  source 1..26: mol_type = genomic DNA
agaaagctcacaagaactgctaactc

SEQ ID NO: 62991 - DNA, 27 bp, Homo sapiens
  source 1..27: mol_type = genomic DNA
actttgtcaaagttaaattataggcta

SEQ ID NO: 62992 - DNA, 17 bp, Homo sapiens
  source 1..17: mol_type = genomic DNA
actttgaatccagcgat

SEQ ID NO: 62993 - DNA, 31 bp, Homo sapiens; identical to SEQ ID NO: 3523
  source 1..31: mol_type = genomic DNA

SEQ ID NO: 62994 - DNA, 21 bp, Homo sapiens
  source 1..21: mol_type = genomic DNA
acttataatgccgaggttgtg

SEQ ID NO: 62995 - DNA, 38 bp, Homo sapiens; identical to SEQ ID NO: 3418
  source 1..38: mol_type = genomic DNA

SEQ ID NO: 62996 - DNA, 33 bp, Homo sapiens; identical to SEQ ID NO: 3362
  source 1..33: mol_type = genomic DNA

SEQ ID NO: 62997 - DNA, 33 bp, Homo sapiens; identical to SEQ ID NO: 3335
  source 1..33: mol_type = genomic DNA

SEQ ID NO: 62998 - DNA, 48 bp, Homo sapiens; identical to SEQ ID NO: 3325
  source 1..48: mol_type = genomic DNA

SEQ ID NO: 62999 - DNA, 30 bp, Homo sapiens; identical to SEQ ID NO: 3304
  source 1..30: mol_type = genomic DNA

SEQ ID NO: 63000 - DNA, 37 bp, Homo sapiens; identical to SEQ ID NO: 3150
  source 1..37: mol_type = genomic DNA

SEQ ID NO: 63001 - DNA, 35 bp, Homo sapiens; identical to SEQ ID NO: 3122
  source 1..35: mol_type = genomic DNA

SEQ ID NO: 63002 - DNA, 30 bp, Homo sapiens; identical to SEQ ID NO: 3111
  source 1..30: mol_type = genomic DNA

SEQ ID NO: 63003 - DNA, 34 bp, Homo sapiens; identical to SEQ ID NO: 3107
  source 1..34: mol_type = genomic DNA

SEQ ID NO: 63004 - DNA, 39 bp, Homo sapiens; identical to SEQ ID NO: 3083
  source 1..39: mol_type = genomic DNA

SEQ ID NO: 63005 - DNA, 33 bp, Homo sapiens; identical to SEQ ID NO: 3077
  source 1..33: mol_type = genomic DNA

SEQ ID NO: 63006 - DNA, 32 bp, Homo sapiens; identical to SEQ ID NO: 3076
  source 1..32: mol_type = genomic DNA

SEQ ID NO: 63007 - DNA, 27 bp, Homo sapiens
  source 1..27: mol_type = genomic DNA
acgatggtttttcatatcattggtcgt

SEQ ID NO: 63008 - DNA, 47 bp, Homo sapiens; identical to SEQ ID NO: 3056
  source 1..47: mol_type = genomic DNA

SEQ ID NO: 63009 - DNA, 22 bp, Homo sapiens
  source 1..22: mol_type = genomic DNA
accggagatgaaaacctttttc

SEQ ID NO: 63010 - DNA, 21 bp, Homo sapiens
  source 1..21: mol_type = genomic DNA
accggagatgaaaaccttttt

SEQ ID NO: 63011 - DNA, 16 bp, Homo sapiens
  source 1..16: mol_type = genomic DNA
accgagcggaaacacc

SEQ ID NO: 63012 - DNA, 41 bp, Homo sapiens; identical to SEQ ID NO: 2829
  source 1..41: mol_type = genomic DNA

SEQ ID NO: 63013 - DNA, 23 bp, Homo sapiens
  source 1..23: mol_type = genomic DNA
acccaacttacacttaggagatt

SEQ ID NO: 63014 - DNA, 33 bp, Homo sapiens; identical to SEQ ID NO: 2782
  source 1..33: mol_type = genomic DNA

SEQ ID NO: 63015 - DNA, 48 bp, Homo sapiens; identical to SEQ ID NO: 2740
  source 1..48: mol_type = genomic DNA

SEQ ID NO: 63016 - DNA, 45 bp, Homo sapiens; identical to SEQ ID NO: 2690
  source 1..45: mol_type = genomic DNA

SEQ ID NO: 63017 - DNA, 44 bp, Homo sapiens; identical to SEQ ID NO: 2689
  source 1..44: mol_type = genomic DNA

SEQ ID NO: 63018 - DNA, 39 bp, Homo sapiens; identical to SEQ ID NO: 2684
  source 1..39: mol_type = genomic DNA

SEQ ID NO: 63019 - DNA, 19 bp, Homo sapiens
  source 1..19: mol_type = genomic DNA
acatcagattgtgaatctg

SEQ ID NO: 63020 - DNA, 31 bp, Homo sapiens; identical to SEQ ID NO: 2621
  source 1..31: mol_type = genomic DNA

SEQ ID NO: 63021 - DNA, 41 bp, Homo sapiens; identical to SEQ ID NO: 2515
  source 1..41: mol_type = genomic DNA

SEQ ID NO: 63022 - DNA, 45 bp, Homo sapiens; identical to SEQ ID NO: 2458
  source 1..45: mol_type = genomic DNA

SEQ ID NO: 63023 - DNA, 41 bp, Homo sapiens; identical to SEQ ID NO: 2455
  source 1..41: mol_type = genomic DNA

SEQ ID NO: 63024 - DNA, 37 bp, Homo sapiens; identical to SEQ ID NO: 2453
  source 1..37: mol_type = genomic DNA

SEQ ID NO: 63025 - DNA, 18 bp, Homo sapiens
  source 1..18: mol_type = genomic DNA
acaacgatggtttttcat

SEQ ID NO: 63026 - DNA, 18 bp, Homo sapiens
  source 1..18: mol_type = genomic DNA
acaaagcacccaacttac

SEQ ID NO: 63027 - DNA, 26 bp, Homo sapiens
  source 1..26: mol_type = genomic DNA
acaaaacgaatgatttcgactcatta

SEQ ID NO: 63028 - DNA, 26 bp, Homo sapiens
  source 1..26: mol_type = genomic DNA
aattgcaaattcgaagaagcagcttc

SEQ ID NO: 63029 - DNA, 19 bp, Homo sapiens
  source 1..19: mol_type = genomic DNA
aattgcaaattcgaagaag

SEQ ID NO: 63030 - DNA, 20 bp, Homo sapiens
  source 1..20: mol_type = genomic DNA
aattcgaagaagcagcttca

SEQ ID NO: 63031 - DNA, 18 bp, Homo sapiens
  source 1..18: mol_type = genomic DNA
aattcaaaggttccgggt

SEQ ID NO: 63032 - DNA, 18 bp, Homo sapiens
  source 1..18: mol_type = genomic DNA
aattagaatcttagcttt

SEQ ID NO: 63033 - DNA, 33 bp, Homo sapiens; identical to SEQ ID NO: 2307
  source 1..33: mol_type = genomic DNA

SEQ ID NO: 63034 - DNA, 40 bp, Homo sapiens; identical to SEQ ID NO: 2260
  source 1..40: mol_type = genomic DNA

SEQ ID NO: 63035 - DNA, 18 bp, Homo sapiens
  source 1..18: mol_type = genomic DNA
aatggtagaattctcgcc

SEQ ID NO: 63036 - DNA, 43 bp, Homo sapiens; identical to SEQ ID NO: 2207
  source 1..43: mol_type = genomic DNA

SEQ ID NO: 63037 - DNA, 23 bp, Homo sapiens
  source 1..23: mol_type = genomic DNA
aatggataaggcatcagcctccg

SEQ ID NO: 63038 - DNA, 23 bp, Homo sapiens
  source 1..23: mol_type = genomic DNA
aatggacatatgtccgcgtgggt

SEQ ID NO: 63039 - DNA, 44 bp, Homo sapiens; identical to SEQ ID NO: 2136
  source 1..44: mol_type = genomic DNA

SEQ ID NO: 63040 - DNA, 27 bp, Homo sapiens
  source 1..27: mol_type = genomic DNA
aatgatttcgactcattaaattatgat

SEQ ID NO: 63041 - DNA, 19 bp, Homo sapiens
  source 1..19: mol_type = genomic DNA
aatgatttcgactcattaa

SEQ ID NO: 63042 - DNA, 48 bp, Homo sapiens; identical to SEQ ID NO: 2026
  source 1..48: mol_type = genomic DNA

SEQ ID NO: 63043 - DNA, 16 bp, Homo sapiens
  source 1..16: mol_type = genomic DNA
aatcccaccgctgcca

SEQ ID NO: 63044 - DNA, 48 bp, Homo sapiens; identical to SEQ ID NO: 1967
  source 1..48: mol_type = genomic DNA

SEQ ID NO: 63045 - DNA, 48 bp, Homo sapiens; identical to SEQ ID NO: 1961
  source 1..48: mol_type = genomic DNA

SEQ ID NO: 63046 - DNA, 32 bp, Homo sapiens; identical to SEQ ID NO: 1917
  source 1..32: mol_type = genomic DNA

SEQ ID NO: 63047 - DNA, 39 bp, Homo sapiens; identical to SEQ ID NO: 1900
  source 1..39: mol_type = genomic DNA

SEQ ID NO: 63048 - DNA, 48 bp, Homo sapiens; identical to SEQ ID NO: 1889
  source 1..48: mol_type = genomic DNA

SEQ ID NO: 63049 - DNA, 41 bp, Homo sapiens; identical to SEQ ID NO: 1888
  source 1..41: mol_type = genomic DNA

SEQ ID NO: 63050 - DNA, 37 bp, Homo sapiens; identical to SEQ ID NO: 1887
  source 1..37: mol_type = genomic DNA

SEQ ID NO: 63051 - DNA, 39 bp, Homo sapiens; identical to SEQ ID NO: 1878
  source 1..39: mol_type = genomic DNA

SEQ ID NO: 63052 - DNA, 28 bp, Homo sapiens
  source 1..28: mol_type = genomic DNA
aatagtttaaattagaatcttagctttg

SEQ ID NO: 63053 - DNA, 31 bp, Homo sapiens; identical to SEQ ID NO: 1853
  source 1..31: mol_type = genomic DNA

SEQ ID NO: 63054 - DNA, 28 bp, Homo sapiens
  source 1..28: mol_type = genomic DNA
aataggagcttaaacccccttatttcta

SEQ ID NO: 63055 - DNA, 26 bp, Homo sapiens
  source 1..26: mol_type = genomic DNA
aataggagcttaaacccccttatttc

SEQ ID NO: 63056 - DNA, 35 bp, Homo sapiens; identical to SEQ ID NO: 1817
  source 1..35: mol_type = genomic DNA

SEQ ID NO: 63057 - DNA, 26 bp, Homo sapiens
  source 1..26: mol_type = genomic DNA
aatacaacgatggtttttcatatcat

SEQ ID NO: 63058 - DNA, 23 bp, Homo sapiens
  source 1..23: mol_type = genomic DNA
aatacaacgatggtttttcatat

SEQ ID NO: 63059 - DNA, 26 bp, Homo sapiens
  source 1..26: mol_type = genomic DNA
aataataggagcttaaacccccttat

SEQ ID NO: 63060 - DNA, 36 bp, Homo sapiens; identical to SEQ ID NO: 1769
  source 1..36: mol_type = genomic DNA

SEQ ID NO: 63061 - DNA, 25 bp, Homo sapiens
  source 1..25: mol_type = genomic DNA
aagttaaagattaagagaaccaaca

SEQ ID NO: 63062 - DNA, 31 bp, Homo sapiens; identical to SEQ ID NO: 1676
  source 1..31: mol_type = genomic DNA

SEQ ID NO: 63063 - DNA, 33 bp, Homo sapiens; identical to SEQ ID NO: 1658
  source 1..33: mol_type = genomic DNA

SEQ ID NO: 63064 - DNA, 48 bp, Homo sapiens; identical to SEQ ID NO: 1630
  source 1..48: mol_type = genomic DNA

SEQ ID NO: 63065 - DNA, 34 bp, Homo sapiens; identical to SEQ ID NO: 1611
  source 1..34: mol_type = genomic DNA

SEQ ID NO: 63066 - DNA, 32 bp, Homo sapiens; identical to SEQ ID NO: 1594
  source 1..32: mol_type = genomic DNA

SEQ ID NO: 63067 - DNA, 32 bp, Homo sapiens; identical to SEQ ID NO: 1540
  source 1..32: mol_type = genomic DNA

SEQ ID NO: 63068 - DNA, 25 bp, Homo sapiens
  source 1..25: mol_type = genomic DNA
aagctcacaagaactgctaactcat

SEQ ID NO: 63069 - DNA, 16 bp, Homo sapiens
  source 1..16: mol_type = genomic DNA
aagctcacaagaactg

SEQ ID NO: 63070 - DNA, 36 bp, Homo sapiens; identical to SEQ ID NO: 1519
  source 1..36: mol_type = genomic DNA

SEQ ID NO: 63071 - DNA, 34 bp, Homo sapiens; identical to SEQ ID NO: 1517
  source 1..34: mol_type = genomic DNA

SEQ ID NO: 63072 - DNA, 28 bp, Homo sapiens
  source 1..28: mol_type = genomic DNA
aagctatcgggcccataccccgaaaatg

SEQ ID NO: 63073 - DNA, 35 bp, Homo sapiens; identical to SEQ ID NO: 1496
  source 1..35: mol_type = genomic DNA

SEQ ID NO: 63074 - DNA, 35 bp, Homo sapiens; identical to SEQ ID NO: 1481
  source 1..35: mol_type = genomic DNA

SEQ ID NO: 63075 - DNA, 39 bp, Homo sapiens; identical to SEQ ID NO: 1448
  source 1..39: mol_type = genomic DNA

SEQ ID NO: 63076 - DNA, 37 bp, Homo sapiens; identical to SEQ ID NO: 1427
  source 1..37: mol_type = genomic DNA

SEQ ID NO: 63077 - DNA, 34 bp, Homo sapiens; identical to SEQ ID NO: 1400
  source 1..34: mol_type = genomic DNA

SEQ ID NO: 63078 - DNA, 31 bp, Homo sapiens; identical to SEQ ID NO: 1377
  source 1..31: mol_type = genomic DNA

SEQ ID NO: 63079 - DNA, 27 bp, Homo sapiens
  source 1..27: mol_type = genomic DNA
aagattaagagaaccaacacctcttta

SEQ ID NO: 63080 - DNA, 33 bp, Homo sapiens; identical to SEQ ID NO: 1306
  source 1..33: mol_type = genomic DNA

SEQ ID NO: 63081 - DNA, 18 bp, Homo sapiens
  source 1..18: mol_type = genomic DNA
aagagttactttgataga

SEQ ID NO: 63082 - DNA, 26 bp, Homo sapiens
  source 1..26: mol_type = genomic DNA
aagagccttcaaagccctcagtaagt

SEQ ID NO: 63083 - DNA, 27 bp, Homo sapiens
  source 1..27: mol_type = genomic DNA
aagagaaccaacacctctttacagtga

SEQ ID NO: 63084 - DNA, 17 bp, Homo sapiens
  source 1..17: mol_type = genomic DNA
aagaagcagcttcaaac

SEQ ID NO: 63085 - DNA, 31 bp, Homo sapiens; identical to SEQ ID NO: 1228
  source 1..31: mol_type = genomic DNA

SEQ ID NO: 63086 - DNA, 30 bp, Homo sapiens; identical to SEQ ID NO: 1205
  source 1..30: mol_type = genomic DNA

SEQ ID NO: 63087 - DNA, 28 bp, Homo sapiens
  source 1..28: mol_type = genomic DNA
aactttgtcaaagttaaattataggcta

SEQ ID NO: 63088 - DNA, 46 bp, Homo sapiens; identical to SEQ ID NO: 1128
  source 1..46: mol_type = genomic DNA

SEQ ID NO: 63089 - DNA, 35 bp, Homo sapiens; identical to SEQ ID NO: 1125
  source 1..35: mol_type = genomic DNA

SEQ ID NO: 63090 - DNA, 18 bp, Homo sapiens
  source 1..18: mol_type = genomic DNA
aactgggcggaaacacca

SEQ ID NO: 63091 - DNA, 17 bp, Homo sapiens
  source 1..17: mol_type = genomic DNA
aactgggcggaaacacc

SEQ ID NO: 63092 - DNA, 41 bp, Homo sapiens; identical to SEQ ID NO: 1108
  source 1..41: mol_type = genomic DNA

SEQ ID NO: 63093 - DNA, 34 bp, Homo sapiens; identical to SEQ ID NO: 1038
  source 1..34: mol_type = genomic DNA

SEQ ID NO: 63094 - DNA, 36 bp, Homo sapiens; identical to SEQ ID NO: 1009
  source 1..36: mol_type = genomic DNA

SEQ ID NO: 63095 - DNA, 28 bp, Homo sapiens
  source 1..28: mol_type = genomic DNA
aacgatggtttttcatatcattggtcgt

SEQ ID NO: 63096 - DNA, 16 bp, Homo sapiens
  source 1..16: mol_type = genomic DNA
aacgatggtttttcat

SEQ ID NO: 63097 - DNA, 48 bp, Homo sapiens; identical to SEQ ID NO: 998
  source 1..48: mol_type = genomic DNA

SEQ ID NO: 63098 - DNA, 16 bp, Homo sapiens
  source 1..16: mol_type = genomic DNA
aacgaatgatttcgac

SEQ ID NO: 63099 - DNA, 48 bp, Homo sapiens; identical to SEQ ID NO: 978
  source 1..48: mol_type = genomic DNA

SEQ ID NO: 63100 - DNA, 18 bp, Homo sapiens
  source 1..18: mol_type = genomic DNA
aaccgggcagaaacacca

SEQ ID NO: 63101 - DNA, 23 bp, Homo sapiens
  source 1..23: mol_type = genomic DNA
aaccggagatgaaaacctttttc

SEQ ID NO: 63102 - DNA, 21 bp, Homo sapiens
  source 1..21: mol_type = genomic DNA
aaccggagatgaaaacctttt

SEQ ID NO: 63103 - DNA, 18 bp, Homo sapiens
  source 1..18: mol_type = genomic DNA
aaccgagcggaaacacca

SEQ ID NO: 63104 - DNA, 17 bp, Homo sapiens
  source 1..17: mol_type = genomic DNA
aaccgagcggaaacacc

SEQ ID NO: 63105 - DNA, 37 bp, Homo sapiens; identical to SEQ ID NO: 911
  source 1..37: mol_type = genomic DNA

SEQ ID NO: 63106 - DNA, 34 bp, Homo sapiens; identical to SEQ ID NO: 838
  source 1..34: mol_type = genomic DNA

SEQ ID NO: 63107 - DNA, 32 bp, Homo sapiens; identical to SEQ ID NO: 836
  source 1..32: mol_type = genomic DNA

SEQ ID NO: 63108 - DNA, 22 bp, Homo sapiens
  source 1..22: mol_type = genomic DNA
aaccaaaacatcagattgtgaa

SEQ ID NO: 63109 - DNA, 47 bp, Homo sapiens; identical to SEQ ID NO: 816
  source 1..47: mol_type = genomic DNA

SEQ ID NO: 63110 - DNA, 45 bp, Homo sapiens; identical to SEQ ID NO: 814
  source 1..45: mol_type = genomic DNA

SEQ ID NO: 63111 - DNA, 34 bp, Homo sapiens; identical to SEQ ID NO: 783
  source 1..34: mol_type = genomic DNA

SEQ ID NO: 63112 - DNA, 34 bp, Homo sapiens; identical to SEQ ID NO: 771
  source 1..34: mol_type = genomic DNA

SEQ ID NO: 63113 - DNA, 24 bp, Homo sapiens
  source 1..24: mol_type = genomic DNA
aacaggagatcctgggttcgaatc

SEQ ID NO: 63114 - DNA, 31 bp, Homo sapiens; identical to SEQ ID NO: 759
  source 1..31: mol_type = genomic DNA

SEQ ID NO: 63115 - DNA, 28 bp, Homo sapiens
  source 1..28: mol_type = genomic DNA
aacagctatccattggtcttaggcccca

SEQ ID NO: 63116 - DNA, 29 bp, Homo sapiens
  source 1..29: mol_type = genomic DNA
aacagaggcttacgaccccttatttaccc

SEQ ID NO: 63117 - DNA, 24 bp, Homo sapiens
  source 1..24: mol_type = genomic DNA
aacagaggcttacgaccccttatt

SEQ ID NO: 63118 - DNA, 20 bp, Homo sapiens
  source 1..20: mol_type = genomic DNA
aacagaggcttacgacccct

SEQ ID NO: 63119 - DNA, 34 bp, Homo sapiens; identical to SEQ ID NO: 707
  source 1..34: mol_type = genomic DNA

SEQ ID NO: 63120 - DNA, 27 bp, Homo sapiens
  source 1..27: mol_type = genomic DNA
aacaaaacgaatgatttcgactcatta

SEQ ID NO: 63121 - DNA, 22 bp, Homo sapiens
  source 1..22: mol_type = genomic DNA
aaatttaggttaaatacagacc

SEQ ID NO: 63122 - DNA, 22 bp, Homo sapiens
  source 1..22: mol_type = genomic DNA
aaattataggctaaatcctata

SEQ ID NO: 63123 - DNA, 20 bp, Homo sapiens
  source 1..20: mol_type = genomic DNA
aaattagaatcttagctttg

SEQ ID NO: 63124 - DNA, 34 bp, Homo sapiens; identical to SEQ ID NO: 646
  source 1..34: mol_type = genomic DNA

SEQ ID NO: 63125 - DNA, 25 bp, Homo sapiens
  source 1..25: mol_type = genomic DNA
aaatgtttagacgggctcacatcac

SEQ ID NO: 63126 - DNA, 23 bp, Homo sapiens
  source 1..23: mol_type = genomic DNA
aaatgtttagacgggctcacatc

SEQ ID NO: 63127 - DNA, 30 bp, Homo sapiens; identical to SEQ ID NO: 617
  source 1..30: mol_type = genomic DNA

SEQ ID NO: 63128 - DNA, 29 bp, Homo sapiens
  source 1..29: mol_type = genomic DNA
aaatacagaccaagagccttcaaagccct

SEQ ID NO: 63129 - DNA, 28 bp, Homo sapiens
  source 1..28: mol_type = genomic DNA
aaatacagaccaagagccttcaaagccc

SEQ ID NO: 63130 - DNA, 27 bp, Homo sapiens
  source 1..27: mol_type = genomic DNA
aaatacagaccaagagccttcaaagcc

SEQ ID NO: 63131 - DNA, 48 bp, Homo sapiens; identical to SEQ ID NO: 545
  source 1..48: mol_type = genomic DNA

SEQ ID NO: 63132 - DNA, 46 bp, Homo sapiens; identical to SEQ ID NO: 543
  source 1..46: mol_type = genomic DNA

SEQ ID NO: 63133 - DNA, 24 bp, Homo sapiens
  source 1..24: mol_type = genomic DNA
aaagttaaattataggctaaatcc

SEQ ID NO: 63134 - DNA, 21 bp, Homo sapiens
  source 1..21: mol_type = genomic DNA
aaagttaaattataggctaaa

SEQ ID NO: 63135 - DNA, 20 bp, Homo sapiens
  source 1..20: mol_type = genomic DNA
aaagttaaattataggctaa

SEQ ID NO: 63136 - DNA, 37 bp, Homo sapiens; identical to SEQ ID NO: 420
  source 1..37: mol_type = genomic DNA

SEQ ID NO: 63137 - DNA, 34 bp, Homo sapiens; identical to SEQ ID NO: 417
  source 1..34: mol_type = genomic DNA

SEQ ID NO: 63138 - DNA, 32 bp, Homo sapiens; identical to SEQ ID NO: 415
  source 1..32: mol_type = genomic DNA

SEQ ID NO: 63139 - DNA, 31 bp, Homo sapiens; identical to SEQ ID NO: 414
  source 1..31: mol_type = genomic DNA

SEQ ID NO: 63140 - DNA, 22 bp, Homo sapiens
  source 1..22: mol_type = genomic DNA
aaagctcacaagaactgctaac

SEQ ID NO: 63141 - DNA, 21 bp, Homo sapiens
  source 1..21: mol_type = genomic DNA
aaagctcacaagaactgctaa

SEQ ID NO: 63142 - DNA, 17 bp, Homo sapiens
  source 1..17: mol_type = genomic DNA
aaagctcacaagaactg

SEQ ID NO: 63143 - DNA, 38 bp, Homo sapiens; identical to SEQ ID NO: 394
  source 1..38: mol_type = genomic DNA

SEQ ID NO: 63144 - DNA, 16 bp, Homo sapiens
  source 1..16: mol_type = genomic DNA
aaagcacccaacttac

SEQ ID NO: 63145 - DNA, 28 bp, Homo sapiens
  source 1..28: mol_type = genomic DNA
aaagattaagagaaccaacacctcttta

SEQ ID NO: 63146 - DNA, 22 bp, Homo sapiens
  source 1..22: mol_type = genomic DNA
aaagacaggggttaggcctctt

SEQ ID NO: 63147 - DNA, 25 bp, Homo sapiens
  source 1..25: mol_type = genomic DNA
aaacgaatgatttcgactcattaaa

SEQ ID NO: 63148 - DNA, 24 bp, Homo sapiens
  source 1..24: mol_type = genomic DNA
aaacgaatgatttcgactcattaa

SEQ ID NO: 63149 - DNA, 18 bp, Homo sapiens
  source 1..18: mol_type = genomic DNA
aaaccggagatgaaaacc

SEQ ID NO: 63150 - DNA, 20 bp, Homo sapiens
  source 1..20: mol_type = genomic DNA
aaaccgaagatcgcgggttc

SEQ ID NO: 63151 - DNA, 33 bp, Homo sapiens; identical to SEQ ID NO: 244
  source 1..33: mol_type = genomic DNA

SEQ ID NO: 63152 - DNA, 48 bp, Homo sapiens; identical to SEQ ID NO: 222
  source 1..48: mol_type = genomic DNA

SEQ ID NO: 63153 - DNA, 39 bp, Homo sapiens; identical to SEQ ID NO: 187
  source 1..39: mol_type = genomic DNA

SEQ ID NO: 63154 - DNA, 17 bp, Homo sapiens
  source 1..17: mol_type = genomic DNA
aaaagagttactttgat

SEQ ID NO: 63155 - DNA, 27 bp, Homo sapiens
  source 1..27: mol_type = genomic DNA
aaaacttaaaactttacagtcagaggt

SEQ ID NO: 63156 - DNA, 17 bp, Homo sapiens
  source 1..17: mol_type = genomic DNA
aaaacttaaaactttac

SEQ ID NO: 63157 - DNA, 24 bp, Homo sapiens
  source 1..24: mol_type = genomic DNA
aaaacgaatgatttcgactcatta

SEQ ID NO: 63158 - DNA, 18 bp, Homo sapiens
  source 1..18: mol_type = genomic DNA
aaaacgaatgatttcgac

SEQ ID NO: 63159 - DNA, 48 bp, Homo sapiens; identical to SEQ ID NO: 59
  source 1..48: mol_type = genomic DNA

SEQ ID NO: 63160 - DNA, 16 bp, Homo sapiens
  source 1..16: mol_type = genomic DNA
aaaaagtcatggaggc

SEQ ID NO: 63161 - DNA, 23 bp, Homo sapiens
  source 1..23: mol_type = genomic DNA
aaaaaccatttcataactttgtc

SEQ ID NO: 63162 - DNA, 18 bp, Homo sapiens
  source 1..18: mol_type = genomic DNA
aaaaaccatttcataact

SEQ ID NO: 63163 - DNA, 29 bp, Homo sapiens
  source 1..29: mol_type = genomic DNA
tttgtgggtttaagtcccattggtctagc

SEQ ID NO: 63164 - DNA, 28 bp, Homo sapiens
  source 1..28: mol_type = genomic DNA
ttgagggttcgaatcccttcgtggttgc

SEQ ID NO: 63165 - DNA, 43 bp, Homo sapiens; identical to SEQ ID NO: 42190
  source 1..43: mol_type = genomic DNA

SEQ ID NO: 63166 - DNA, 30 bp, Homo sapiens; identical to SEQ ID NO: 42015
  source 1..30: mol_type = genomic DNA

SEQ ID NO: 63167 - DNA, 31 bp, Homo sapiens; identical to SEQ ID NO: 26956
  source 1..31: mol_type = genomic DNA

SEQ ID NO: 63168 - DNA, 32 bp, Homo sapiens; identical to SEQ ID NO: 26876
  source 1..32: mol_type = genomic DNA

SEQ ID NO: 63169 - DNA, 19 bp, Homo sapiens
  source 1..19: mol_type = genomic DNA
tcgactcccggtatgggaa

SEQ ID NO: 63170 - DNA, 20 bp, Homo sapiens
  source 1..20: mol_type = genomic DNA
tcgaatcccagtagagcctc

SEQ ID NO: 63171 - DNA, 20 bp, Homo sapiens
  source 1..20: mol_type = genomic DNA
tcgaaaccgggcagaagcac

SEQ ID NO: 63172 - DNA, 43 bp, Homo sapiens; identical to SEQ ID NO: 25543
  source 1..43: mol_type = genomic DNA

SEQ ID NO: 63173 - DNA, 43 bp, Homo sapiens; identical to SEQ ID NO: 41033
  source 1..43: mol_type = genomic DNA

SEQ ID NO: 63174 - DNA, 34 bp, Homo sapiens; identical to SEQ ID NO: 24920
  source 1..34: mol_type = genomic DNA

SEQ ID NO: 63175 - DNA, 34 bp, Homo sapiens; identical to SEQ ID NO: 24889
  source 1..34: mol_type = genomic DNA

SEQ ID NO: 63176 - DNA, 32 bp, Homo sapiens; identical to SEQ ID NO: 24143
  source 1..32: mol_type = genomic DNA

SEQ ID NO: 63177 - DNA, 34 bp, Homo sapiens; identical to SEQ ID NO: 23656
  source 1..34: mol_type = genomic DNA

SEQ ID NO: 63178 - DNA, 22 bp, Homo sapiens
  source 1..22: mol_type = genomic DNA
gttcgagcctcagagagggcac

SEQ ID NO: 63179 - DNA, 29 bp, Homo sapiens
  source 1..29: mol_type = genomic DNA
gtcgctggttcgattccggctcgaaggac

SEQ ID NO: 63180 - DNA, 23 bp, Homo sapiens
  source 1..23: mol_type = genomic DNA
ggttcgattcccggtcatggaac

SEQ ID NO: 63181 - DNA, 24 bp, Homo sapiens
  source 1..24: mol_type = genomic DNA
gggttcgattcccggccagggaac

SEQ ID NO: 63182 - DNA, 25 bp, Homo sapiens
  source 1..25: mol_type = genomic DNA
gggttcgagtcccatctggggtgcc

SEQ ID NO: 63183 - DNA, 28 bp, Homo sapiens
  source 1..28: mol_type = genomic DNA
ggcccgggttcgactcccggtatgggaa

SEQ ID NO: 63184 - DNA, 22 bp, Homo sapiens
  source 1..22: mol_type = genomic DNA
ggagtggttatcacgttcgcct

SEQ ID NO: 63185 - DNA, 36 bp, Homo sapiens; identical to SEQ ID NO: 17452
  source 1..36: mol_type = genomic DNA

SEQ ID NO: 63186 - DNA, 34 bp, Homo sapiens; identical to SEQ ID NO: 17245
  source 1..34: mol_type = genomic DNA

SEQ ID NO: 63187 - DNA, 36 bp, Homo sapiens; identical to SEQ ID NO: 17222
  source 1..36: mol_type = genomic DNA

SEQ ID NO: 63188 - DNA, 16 bp, Homo sapiens
  source 1..16: mol_type = genomic DNA
gcggcccgggttcgac

SEQ ID NO: 63189 - DNA, 37 bp, Homo sapiens; identical to SEQ ID NO: 16693
  source 1..37: mol_type = genomic DNA

SEQ ID NO: 63190 - DNA, 31 bp, Homo sapiens; identical to SEQ ID NO: 16297
  source 1..31: mol_type = genomic DNA

SEQ ID NO: 63191 - DNA, 33 bp, Homo sapiens; identical to SEQ ID NO: 15309
  source 1..33: mol_type = genomic DNA

SEQ ID NO: 63192 - DNA, 18 bp, Homo sapiens
  source 1..18: mol_type = genomic DNA
gaatcctgttcgtgacgc

SEQ ID NO: 63193 - DNA, 43 bp, Homo sapiens; identical to SEQ ID NO: 14363
  source 1..43: mol_type = genomic DNA

SEQ ID NO: 63194 - DNA, 45 bp, Homo sapiens; identical to SEQ ID NO: 36541
  source 1..45: mol_type = genomic DNA

SEQ ID NO: 63195 - DNA, 33 bp, Homo sapiens; identical to SEQ ID NO: 12180
  source 1..33: mol_type = genomic DNA

SEQ ID NO: 63196 - DNA, 23 bp, Homo sapiens
  source 1..23: mol_type = genomic DNA
cgcagcggaagcgtgctgggccc

SEQ ID NO: 63197 - DNA, 17 bp, Homo sapiens
  source 1..17: mol_type = genomic DNA
cgagccccagtggaacc

SEQ ID NO: 63198 - DNA, 40 bp, Homo sapiens; identical to SEQ ID NO: 11506
  source 1..40: mol_type = genomic DNA

SEQ ID NO: 63199 - DNA, 26 bp, Homo sapiens
  source 1..26: mol_type = genomic DNA
cctcggttcgaatccgagtcacggca

SEQ ID NO: 63200 - DNA, 31 bp, Homo sapiens; identical to SEQ ID NO: 10480
  source 1..31: mol_type = genomic DNA

SEQ ID NO: 63201 - DNA, 34 bp, Homo sapiens; identical to SEQ ID NO: 10147
  source 1..34: mol_type = genomic DNA

SEQ ID NO: 63202 - DNA, 36 bp, Homo sapiens; identical to SEQ ID NO: 10144
  source 1..36: mol_type = genomic DNA

SEQ ID NO: 63203 - DNA, 35 bp, Homo sapiens; identical to SEQ ID NO: 9558
  source 1..35: mol_type = genomic DNA

SEQ ID NO: 63204 - DNA, 33 bp, Homo sapiens; identical to SEQ ID NO: 9045
  source 1..33: mol_type = genomic DNA

SEQ ID NO: 63205 - DNA, 24 bp, Homo sapiens
  source 1..24: mol_type = genomic DNA
cagaggtcgatggatcgaaaccat

SEQ ID NO: 63206 - DNA, 38 bp, Homo sapiens; identical to SEQ ID NO: 33917
  source 1..38: mol_type = genomic DNA

SEQ ID NO: 63207 - DNA, 38 bp, Homo sapiens; identical to SEQ ID NO: 33911
  source 1..38: mol_type = genomic DNA

SEQ ID NO: 63208 - DNA, 35 bp, Homo sapiens; identical to SEQ ID NO: 7382
  source 1..35: mol_type = genomic DNA

SEQ ID NO: 63209 - DNA, 38 bp, Homo sapiens; identical to SEQ ID NO: 6858
  source 1..38: mol_type = genomic DNA

SEQ ID NO: 63210 - DNA, 41 bp, Homo sapiens; identical to SEQ ID NO: 5967
  source 1..41: mol_type = genomic DNA

SEQ ID NO: 63211 - DNA, 27 bp, Homo sapiens
  source 1..27: mol_type = genomic DNA
aggcggcccgggttcgactcccggtgt

SEQ ID NO: 63212 - DNA, 41 bp, Homo sapiens; identical to SEQ ID NO: 4159
  source 1..41: mol_type = genomic DNA

SEQ ID NO: 63213 - DNA, 28 bp, Homo sapiens
  source 1..28: mol_type = genomic DNA
accggggttcaattccccgacggggagc

SEQ ID NO: 63214 - DNA, 35 bp, Homo sapiens; identical to SEQ ID NO: 2927
  source 1..35: mol_type = genomic DNA

SEQ ID NO: 63215 - DNA, 17 bp, Homo sapiens
  source 1..17: mol_type = genomic DNA
aatctcggtgggacctc

SEQ ID NO: 63216 - DNA, 22 bp, Homo sapiens
  source 1..22: mol_type = genomic DNA
aagattgcaggttcgagtcctg

SEQ ID NO: 63217 - DNA, 19 bp, Homo sapiens
  source 1..19: mol_type = genomic DNA
aaaccgggcagaagcacca

SEQ ID NO: 63218 - DNA, 37 bp, Homo sapiens; identical to SEQ ID NO: 28542
  source 1..37: mol_type = genomic DNA

SEQ ID NO: 63219 - DNA, 38 bp, Homo sapiens; identical to SEQ ID NO: 28300
  source 1..38: mol_type = genomic DNA

SEQ ID NO: 63220 - DNA, 39 bp, Homo sapiens; identical to SEQ ID NO: 28285
  source 1..39: mol_type = genomic DNA

SEQ ID NO: 63221 - DNA, 30 bp, Homo sapiens; identical to SEQ ID NO: 28193
  source 1..30: mol_type = genomic DNA

SEQ ID NO: 63222 - DNA, 34 bp, Homo sapiens; identical to SEQ ID NO: 27585
  source 1..34: mol_type = genomic DNA

SEQ ID NO: 63223 - DNA, 37 bp, Homo sapiens; identical to SEQ ID NO: 27495
  source 1..37: mol_type = genomic DNA

SEQ ID NO: 63224 - DNA, 27 bp, Homo sapiens
  source 1..27: mol_type = genomic DNA
tgagggttcgaatcccttcgtggttgc

SEQ ID NO: 63225 - DNA, 26 bp, Homo sapiens
  source 1..26: mol_type = genomic DNA
tcggcgctctcaccgccgcggcccgg

SEQ ID NO: 63226 - DNA, 20 bp, Homo sapiens
  source 1..20: mol_type = genomic DNA
tcgaatcccttcgtggttgc

SEQ ID NO: 63227 - DNA, 17 bp, Homo sapiens
  source 1..17: mol_type = genomic DNA
tccattggggtttcccc

SEQ ID NO: 63228 - DNA, 29 bp, Homo sapiens
  source 1..29: mol_type = genomic DNA
tcagtcggtagagcatgagactcttaatc

SEQ ID NO: 63229 - DNA, 34 bp, Homo sapiens; identical to SEQ ID NO: 40736
  source 1..34: mol_type = genomic DNA

SEQ ID NO: 63230 - DNA, 33 bp, Homo sapiens; identical to SEQ ID NO: 40217
  source 1..33: mol_type = genomic DNA

SEQ ID NO: 63231 - DNA, 31 bp, Homo sapiens; identical to SEQ ID NO: 22605
  source 1..31: mol_type = genomic DNA

SEQ ID NO: 63232 - DNA, 32 bp, Homo sapiens; identical to SEQ ID NO: 22222
  source 1..32: mol_type = genomic DNA

SEQ ID NO: 63233 - DNA, 22 bp, Homo sapiens
  source 1..22: mol_type = genomic DNA
gttcgagcctcagagagggcac

SEQ ID NO: 63234 - DNA, 17 bp, Homo sapiens
  source 1..17: mol_type = genomic DNA
gtcgatggatcgaaacc

SEQ ID NO: 63235 - DNA, 34 bp, Homo sapiens; identical to SEQ ID NO: 20586
  source 1..34: mol_type = genomic DNA

SEQ ID NO: 63236 - DNA, 46 bp, Homo sapiens; identical to SEQ ID NO: 19946
  source 1..46: mol_type = genomic DNA

SEQ ID NO: 63237 - DNA, 41 bp, Homo sapiens; identical to SEQ ID NO: 19531
  source 1..41: mol_type = genomic DNA

SEQ ID NO: 63238 - DNA, 25 bp, Homo sapiens
  source 1..25: mol_type = genomic DNA
gcgggttcgaaccccgtccgtgcct

SEQ ID NO: 63239 - DNA, 33 bp, Homo sapiens; identical to SEQ ID NO: 17144
  source 1..33: mol_type = genomic DNA

SEQ ID NO: 63240 - DNA, 36 bp, Homo sapiens; identical to SEQ ID NO: 16533
  source 1..36: mol_type = genomic DNA

SEQ ID NO: 63241 - DNA, 32 bp, Homo sapiens; identical to SEQ ID NO: 16461
  source 1..32: mol_type = genomic DNA

SEQ ID NO: 63242 - DNA, 20 bp, Homo sapiens
  source 1..20: mol_type = genomic DNA
gagtggttaaggcattggac

SEQ ID NO: 63243 - DNA, 32 bp, Homo sapiens; identical to SEQ ID NO: 15070
  source 1..32: mol_type = genomic DNA

SEQ ID NO: 63244 - DNA, 37 bp, Homo sapiens; identical to SEQ ID NO: 36634
  source 1..37: mol_type = genomic DNA

SEQ ID NO: 63245 - DNA, 24 bp, Homo sapiens
  source 1..24: mol_type = genomic DNA
cgggttcgactcccggtatgggaa

SEQ ID NO: 63246 - DNA, 34 bp, Homo sapiens; identical to SEQ ID NO: 35902
  source 1..34: mol_type = genomic DNA

SEQ ID NO: 63247 - DNA, 32 bp, Homo sapiens; identical to SEQ ID NO: 12458
  source 1..32: mol_type = genomic DNA

SEQ ID NO: 63248 - DNA, 28 bp, Homo sapiens
  source 1..28: mol_type = genomic DNA
cgcgtgggttcgaatcccatcctcgtcg

SEQ ID NO: 63249 - DNA, 19 bp, Homo sapiens
  source 1..19: mol_type = genomic DNA
cgatcctcgctggggcctc

SEQ ID NO: 63250 - DNA, 18 bp, Homo sapiens
  source 1..18: mol_type = genomic DNA
cgagccccacgttgggcg

SEQ ID NO: 63251 - DNA, 17 bp, Homo sapiens
  source 1..17: mol_type = genomic DNA
cccatatggtctagcgg

SEQ ID NO: 63252 - DNA, 36 bp, Homo sapiens; identical to SEQ ID NO: 34630
  source 1..36: mol_type = genomic DNA

SEQ ID NO: 63253 - DNA, 32 bp, Homo sapiens; identical to SEQ ID NO: 9644
  source 1..32: mol_type = genomic DNA

SEQ ID NO: 63254 - DNA, 19 bp, Homo sapiens
  source 1..19: mol_type = genomic DNA
cagtggtagagcgcatgct

SEQ ID NO: 63255 - DNA, 16 bp, Homo sapiens
  source 1..16: mol_type = genomic DNA
cagtgggtagagcatc

SEQ ID NO: 63256 - DNA, 37 bp, Homo sapiens; identical to SEQ ID NO: 9195
  source 1..37: mol_type = genomic DNA

SEQ ID NO: 63257 - DNA, 25 bp, Homo sapiens
  source 1..25: mol_type = genomic DNA
caggcggcccgggttcgactcccgg

SEQ ID NO: 63258 - DNA, 17 bp, Homo sapiens
  source 1..17: mol_type = genomic DNA
cagagtggcgcagcgga

SEQ ID NO: 63259 - DNA, 33 bp, Homo sapiens; identical to SEQ ID NO: 8588
  source 1..33: mol_type = genomic DNA

SEQ ID NO: 63260 - DNA, 39 bp, Homo sapiens; identical to SEQ ID NO: 45221
  source 1..39: mol_type = genomic DNA

SEQ ID NO: 63261 - DNA, 41 bp, Homo sapiens; identical to SEQ ID NO: 5988
  source 1..41: mol_type = genomic DNA

SEQ ID NO: 63262 - DNA, 16 bp, Homo sapiens
  source 1..16: mol_type = genomic DNA
agtccctgttcgggcg

SEQ ID NO: 63263 - DNA, 25 bp, Homo sapiens
  source 1..25: mol_type = genomic DNA
aggcggcccgggttcgactcccggt

SEQ ID NO: 63264 - DNA, 37 bp, Homo sapiens; identical to SEQ ID NO: 4717
  source 1..37: mol_type = genomic DNA

SEQ ID NO: 63265 - DNA, 21 bp, Homo sapiens
  source 1..21: mol_type = genomic DNA
agagcatgggactcttaatcc

SEQ ID NO: 63266 - DNA, 26 bp, Homo sapiens
  source 1..26: mol_type = genomic DNA
acttcggatcagaagattgcaggttc

SEQ ID NO: 63267 - DNA, 28 bp, Homo sapiens
  source 1..28: mol_type = genomic DNA
acgtgggttcgaatcccatcctcgtcgc

SEQ ID NO: 63268 - DNA, 25 bp, Homo sapiens
  source 1..25: mol_type = genomic DNA
acaggttcgaatcctgttcgtgacg

SEQ ID NO: 63269 - DNA, 17 bp, Homo sapiens
  source 1..17: mol_type = genomic DNA
aagtccctgttcgggcg

SEQ ID NO: 63270 - DNA, 18 bp, Homo sapiens
  source 1..18: mol_type = genomic DNA
aaccccactcctggtacc

SEQ ID NO: 63271 - DNA, 16 bp, Homo sapiens
  source 1..16: mol_type = genomic DNA
ttttcacccaggcggc

SEQ ID NO: 63272 - DNA, 41 bp, Homo sapiens; identical to SEQ ID NO: 31016
  source 1..41: mol_type = genomic DNA

SEQ ID NO: 63273 - DNA, 40 bp, Homo sapiens; identical to SEQ ID NO: 30982
  source 1..40: mol_type = genomic DNA

SEQ ID NO: 63274 - DNA, 37 bp, Homo sapiens; identical to SEQ ID NO: 30923
  source 1..37: mol_type = genomic DNA

SEQ ID NO: 63275 - DNA, 16 bp, Homo sapiens
  source 1..16: mol_type = genomic DNA
tttcacccaggcggcc

SEQ ID NO: 63276 - DNA, 29 bp, Homo sapiens
  source 1..29: mol_type = genomic DNA
ttgtgggttcgagtcccatctgggtcgcc

SEQ ID NO: 63277 - DNA, 28 bp, Homo sapiens
  source 1..28: mol_type = genomic DNA
ttgtgggttcgagtcccatctggggtgc

SEQ ID NO: 63278 - DNA, 42 bp, Homo sapiens; identical to SEQ ID NO: 30607
  source 1..42: mol_type = genomic DNA

SEQ ID NO: 63279 - DNA, 36 bp, Homo sapiens; identical to SEQ ID NO: 30251
  source 1..36: mol_type = genomic DNA

SEQ ID NO: 63280 - DNA, 35 bp, Homo sapiens; identical to SEQ ID NO: 30250
  source 1..35: mol_type = genomic DNA

SEQ ID NO: 63281 - DNA, 28 bp, Homo sapiens
  source 1..28: mol_type = genomic DNA
ttgagggttcgagtcccttcgtggtcgc

SEQ ID NO: 63282 - DNA, 36 bp, Homo sapiens; identical to SEQ ID NO: 29983
  source 1..36: mol_type = genomic DNA

SEQ ID NO: 63283 - DNA, 22 bp, Homo sapiens
  source 1..22: mol_type = genomic DNA
ttcgactcccggtatgggaacc

SEQ ID NO: 63284 - DNA, 22 bp, Homo sapiens
  source 1..22: mol_type = genomic DNA
ttcgaatccggctcggaggacc

SEQ ID NO: 63285 - DNA, 22 bp, Homo sapiens
  source 1..22: mol_type = genomic DNA
ttcgaatcccagtagagcctcc

SEQ ID NO: 63286 - DNA, 22 bp, Homo sapiens
  source 1..22: mol_type = genomic DNA
ttcgaatcccagcggggcctcc

SEQ ID NO: 63287 - DNA, 36 bp, Homo sapiens
  source 1..36: mol_type = genomic DNA
ttcctggttttcacccaggcggcccgggttcgactc

SEQ ID NO: 63288 - DNA, 44 bp, Homo sapiens; identical to SEQ ID NO: 29744
  source 1..44: mol_type = genomic DNA

SEQ ID NO: 63289 - DNA, 39 bp, Homo sapiens; identical to SEQ ID NO: 29495
  source 1..39: mol_type = genomic DNA

SEQ ID NO: 63290 - DNA, 31 bp, Homo sapiens; identical to SEQ ID NO: 29365
  source 1..31: mol_type = genomic DNA

SEQ ID NO: 63291 - DNA, 33 bp, Homo sapiens; identical to SEQ ID NO: 29345
  source 1..33: mol_type = genomic DNA

SEQ ID NO: 63292 - DNA, 34 bp, Homo sapiens; identical to SEQ ID NO: 29342
  source 1..34: mol_type = genomic DNA

SEQ ID NO: 63293 - DNA, 42 bp, Homo sapiens; identical to SEQ ID NO: 29275
  source 1..42: mol_type = genomic DNA

SEQ ID NO: 63294 - DNA, 17 bp, Homo sapiens
  source 1..17: mol_type = genomic DNA
ttaggattcctggtttt

SEQ ID NO: 63295 - DNA, 46 bp, Homo sapiens; identical to SEQ ID NO: 29176
  source 1..46: mol_type = genomic DNA

SEQ ID NO: 63296 - DNA, 42 bp, Homo sapiens; identical to SEQ ID NO: 42556
  source 1..42: mol_type = genomic DNA

SEQ ID NO: 63297 - DNA, 41 bp, Homo sapiens; identical to SEQ ID NO: 29026
  source 1..41: mol_type = genomic DNA

SEQ ID NO: 63298 - DNA, 18 bp, Homo sapiens
  source 1..18: mol_type = genomic DNA
ttaagatccaatggacat

SEQ ID NO: 63299 - DNA, 27 bp, Homo sapiens
  source 1..27: mol_type = genomic DNA
tgtgggttcgagtcccatctgggtcgc

SEQ ID NO: 63300 - DNA, 41 bp, Homo sapiens; identical to SEQ ID NO: 28610
  source 1..41: mol_type = genomic DNA

SEQ ID NO: 63301 - DNA, 42 bp, Homo sapiens; identical to SEQ ID NO: 28558
  source 1..42: mol_type = genomic DNA

SEQ ID NO: 63302 - DNA, 17 bp, Homo sapiens
  source 1..17: mol_type = genomic DNA
tgtagtggtatcatgca

SEQ ID NO: 63303 - DNA, 24 bp, Homo sapiens
  source 1..24: mol_type = genomic DNA
tggttcgatcccgggtttcggcac

SEQ ID NO: 63304 - DNA, 24 bp, Homo sapiens
  source 1..24: mol_type = genomic DNA
tggttcgaatccggctcggaggac

SEQ ID NO: 63305 - DNA, 18 bp, Homo sapiens
  source 1..18: mol_type = genomic DNA
tggttatcacgtctgctt

SEQ ID NO: 63306 - DNA, 39 bp, Homo sapiens; identical to SEQ ID NO: 28285
  source 1..39: mol_type = genomic DNA

SEQ ID NO: 63307 - DNA, 46 bp, Homo sapiens; identical to SEQ ID NO: 42261
  source 1..46: mol_type = genomic DNA

SEQ ID NO: 63308 - DNA, 31 bp, Homo sapiens; identical to SEQ ID NO: 28160
  source 1..31: mol_type = genomic DNA

SEQ ID NO: 63309 - DNA, 47 bp, Homo sapiens; identical to SEQ ID NO: 28142
  source 1..47: mol_type = genomic DNA

SEQ ID NO: 63310 - DNA, 31 bp, Homo sapiens; identical to SEQ ID NO: 27918
  source 1..31: mol_type = genomic DNA

SEQ ID NO: 63311 - DNA, 25 bp, Homo sapiens
  source 1..25: mol_type = genomic DNA
tgggttcgaatcccaccgctgccac

SEQ ID NO: 63312 - DNA, 24 bp, Homo sapiens
  source 1..24: mol_type = genomic DNA
tggggattgtgggttcgagtccca

SEQ ID NO: 63313 - DNA, 19 bp, Homo sapiens
  source 1..19: mol_type = genomic DNA
tgggagagcattagactga

SEQ ID NO: 63314 - DNA, 41 bp, Homo sapiens; identical to SEQ ID NO: 27766
  source 1..41: mol_type = genomic DNA

SEQ ID NO: 63315 - DNA, 40 bp, Homo sapiens; identical to SEQ ID NO: 27765
  source 1..40: mol_type = genomic DNA

SEQ ID NO: 63316 - DNA, 38 bp, Homo sapiens; identical to SEQ ID NO: 42022
  source 1..38: mol_type = genomic DNA

SEQ ID NO: 63317 - DNA, 34 bp, Homo sapiens; identical to SEQ ID NO: 27711
  source 1..34: mol_type = genomic DNA

SEQ ID NO: 63318 - DNA, 32 bp, Homo sapiens; identical to SEQ ID NO: 27710
  source 1..32: mol_type = genomic DNA

SEQ ID NO: 63319 - DNA, 47 bp, Homo sapiens; identical to SEQ ID NO: 41986
  source 1..47: mol_type = genomic DNA

SEQ ID NO: 63320 - DNA, 47 bp, Homo sapiens; identical to SEQ ID NO: 27672
  source 1..47: mol_type = genomic DNA

SEQ ID NO: 63321 - DNA, 27 bp, Homo sapiens
  source 1..27: mol_type = genomic DNA
tgcaggttcgagtcctgccgcggtcgc

SEQ ID NO: 63322 - DNA, 40 bp, Homo sapiens; identical to SEQ ID NO: 27445
  source 1..40: mol_type = genomic DNA

SEQ ID NO: 63323 - DNA, 27 bp, Homo sapiens
  source 1..27: mol_type = genomic DNA
tgagggttcgagtcccttcgtggtcgc

SEQ ID NO: 63324 - DNA, 34 bp, Homo sapiens; identical to SEQ ID NO: 27109
  source 1..34: mol_type = genomic DNA

SEQ ID NO: 63325 - DNA, 34 bp, Homo sapiens; identical to SEQ ID NO: 27101
  source 1..34: mol_type = genomic DNA

SEQ ID NO: 63326 - DNA, 32 bp, Homo sapiens; identical to SEQ ID NO: 27087
  source 1..32: mol_type = genomic DNA

SEQ ID NO: 63327 - DNA, 38 bp, Homo sapiens; identical to SEQ ID NO: 26993
  source 1..38: mol_type = genomic DNA

SEQ ID NO: 63328 - DNA, 38 bp, Homo sapiens; identical to SEQ ID NO: 26986
  source 1..38: mol_type = genomic DNA

SEQ ID NO: 63329 - DNA, 43 bp, Homo sapiens; identical to SEQ ID NO: 26961
  source 1..43: mol_type = genomic DNA

SEQ ID NO: 63330 - DNA, 16 bp, Homo sapiens
  source 1..16: mol_type = genomic DNA
tctgcgttgtggccgc

SEQ ID NO: 63331 - DNA, 42 bp, Homo sapiens; identical to SEQ ID NO: 26728
  source 1..42: mol_type = genomic DNA

SEQ ID NO: 63332 - DNA, 41 bp, Homo sapiens; identical to SEQ ID NO: 26727
  source 1..41: mol_type = genomic DNA

SEQ ID NO: 63333 - DNA, 31 bp, Homo sapiens; identical to SEQ ID NO: 26642
  source 1..31: mol_type = genomic DNA

SEQ ID NO: 63334 - DNA, 18 bp, Homo sapiens
  source 1..18: mol_type = genomic DNA
tctagcggttaggattcc

SEQ ID NO: 63335 - DNA, 16 bp, Homo sapiens
  source 1..16: mol_type = genomic DNA
tctaaggcgctgcgtt

SEQ ID NO: 63336 - DNA, 28 bp, Homo sapiens
  source 1..28: mol_type = genomic DNA
tcgtgagttcgatcctcacacggggcac

SEQ ID NO: 63337 - DNA, 28 bp, Homo sapiens
  source 1..28: mol_type = genomic DNA
tcgctggttcgaatccggctcggaggac

SEQ ID NO: 63338 - DNA, 17 bp, Homo sapiens
  source 1..17: mol_type = genomic DNA
tcgattcccggccaacg

SEQ ID NO: 63339 - DNA, 17 bp, Homo sapiens
  source 1..17: mol_type = genomic DNA
tcgactcctggctggct

SEQ ID NO: 63340 - DNA, 16 bp, Homo sapiens
  source 1..16: mol_type = genomic DNA
tcctcgctggggcctc

SEQ ID NO: 63341 - DNA, 27 bp, Homo sapiens
  source 1..27: mol_type = genomic DNA
tccgggttcgagtcccggcggagtcgc

SEQ ID NO: 63342 - DNA, 41 bp, Homo sapiens; identical to SEQ ID NO: 25797
  source 1..41: mol_type = genomic DNA

SEQ ID NO: 63343 - DNA, 39 bp, Homo sapiens; identical to SEQ ID NO: 25795
  source 1..39: mol_type = genomic DNA

SEQ ID NO: 63344 - DNA, 38 bp, Homo sapiens; identical to SEQ ID NO: 25794
  source 1..38: mol_type = genomic DNA

SEQ ID NO: 63345 - DNA, 43 bp, Homo sapiens; identical to SEQ ID NO: 41210
  source 1..43: mol_type = genomic DNA

SEQ ID NO: 63346 - DNA, 26 bp, Homo sapiens
  source 1..26: mol_type = genomic DNA
tccgagttcaaatctcggtgggacct

SEQ ID NO: 63347 - DNA, 16 bp, Homo sapiens
  source 1..16: mol_type = genomic DNA
tcccggtcatggaacc

SEQ ID NO: 63348 - DNA, 16 bp, Homo sapiens
  source 1..16: mol_type = genomic DNA
tcccggtatgggaacc

SEQ ID NO: 63349 - DNA, 16 bp, Homo sapiens
  source 1..16: mol_type = genomic DNA
tcccggccactgcacc

SEQ ID NO: 63350 - DNA, 42 bp, Homo sapiens; identical to SEQ ID NO: 25542
  source 1..42: mol_type = genomic DNA

SEQ ID NO: 63351 - DNA, 38 bp, Homo sapiens; identical to SEQ ID NO: 25513
  source 1..38: mol_type = genomic DNA

SEQ ID NO: 63352 - DNA, 43 bp, Homo sapiens; identical to SEQ ID NO: 41033
  source 1..43: mol_type = genomic DNA

SEQ ID NO: 63353 - DNA, 44 bp, Homo sapiens; identical to SEQ ID NO: 40981
  source 1..44: mol_type = genomic DNA

SEQ ID NO: 63354 - DNA, 43 bp, Homo sapiens; identical to SEQ ID NO: 40962
  source 1..43: mol_type = genomic DNA

SEQ ID NO: 63355 - DNA, 39 bp, Homo sapiens; identical to SEQ ID NO: 25320
  source 1..39: mol_type = genomic DNA

SEQ ID NO: 63356 - DNA, 38 bp, Homo sapiens; identical to SEQ ID NO: 40952
  source 1..38: mol_type = genomic DNA

SEQ ID NO: 63357 - DNA, 16 bp, Homo sapiens
  source 1..16: mol_type = genomic DNA
tcagtctcataatctg

SEQ ID NO: 63358 - DNA, 20 bp, Homo sapiens
  source 1..20: mol_type = genomic DNA
tcaatcccgggtttcggcac

SEQ ID NO: 63359 - DNA, 19 bp, Homo sapiens
  source 1..19: mol_type = genomic DNA
tcaaatctcggtgggacct

SEQ ID NO: 63360 - DNA, 32 bp, Homo sapiens; identical to SEQ ID NO: 40664
  source 1..32: mol_type = genomic DNA

SEQ ID NO: 63361 - DNA, 27 bp, Homo sapiens
  source 1..27: mol_type = genomic DNA
tatggtctagcggttaggattcctggt

SEQ ID NO: 63362 - DNA, 28 bp, Homo sapiens
  source 1..28: mol_type = genomic DNA
tagtgtagtggttatcacgtctgcttta

SEQ ID NO: 63363 - DNA, 32 bp, Homo sapiens; identical to SEQ ID NO: 24143
  source 1..32: mol_type = genomic DNA

SEQ ID NO: 63364 - DNA, 33 bp, Homo sapiens; identical to SEQ ID NO: 24136
  source 1..33: mol_type = genomic DNA

SEQ ID NO: 63365 - DNA, 45 bp, Homo sapiens; identical to SEQ ID NO: 23794
  source 1..45: mol_type = genomic DNA

SEQ ID NO: 63366 - DNA, 19 bp, Homo sapiens
  source 1..19: mol_type = genomic DNA
taattcaaaggttccgggt

SEQ ID NO: 63367 - DNA, 40 bp, Homo sapiens; identical to SEQ ID NO: 40244
  source 1..40: mol_type = genomic DNA

SEQ ID NO: 63368 - DNA, 33 bp, Homo sapiens; identical to SEQ ID NO: 40217
  source 1..33: mol_type = genomic DNA

SEQ ID NO: 63369 - DNA, 34 bp, Homo sapiens; identical to SEQ ID NO: 40216
  source 1..34: mol_type = genomic DNA

SEQ ID NO: 63370 - DNA, 40 bp, Homo sapiens; identical to SEQ ID NO: 22729
  source 1..40: mol_type = genomic DNA

SEQ ID NO: 63371 - DNA, 40 bp, Homo sapiens; identical to SEQ ID NO: 22682
  source 1..40: mol_type = genomic DNA

SEQ ID NO: 63372 - DNA, 44 bp, Homo sapiens; identical to SEQ ID NO: 22583
  source 1..44: mol_type = genomic DNA

SEQ ID NO: 63373 - DNA, 37 bp, Homo sapiens; identical to SEQ ID NO: 22466
  source 1..37: mol_type = genomic DNA

SEQ ID NO: 63374 - DNA, 23 bp, Homo sapiens
  source 1..23: mol_type = genomic DNA
gttcgatcccgggcggaaacacc

SEQ ID NO: 63375 - DNA, 21 bp, Homo sapiens
  source 1..21: mol_type = genomic DNA
gttcaaatctcggtgggacct

SEQ ID NO: 63376 - DNA, 25 bp, Homo sapiens
  source 1..25: mol_type = genomic DNA
gtgttcgaatcacgtcggggtcacc

SEQ ID NO: 63377 - DNA, 25 bp, Homo sapiens
  source 1..25: mol_type = genomic DNA
gtgttcaaatcacgtcggggtcacc

SEQ ID NO: 63378 - DNA, 16 bp, Homo sapiens
  source 1..16: mol_type = genomic DNA
gtgtagtggtatcatg

SEQ ID NO: 63379 - DNA, 26 bp, Homo sapiens
  source 1..26: mol_type = genomic DNA
gtgggttcgagccccacgttgggcgc

SEQ ID NO: 63380 - DNA, 17 bp, Homo sapiens
  source 1..17: mol_type = genomic DNA
gtggcgcagcggaagcg

SEQ ID NO: 63381 - DNA, 31 bp, Homo sapiens; identical to SEQ ID NO: 20855
  source 1..31: mol_type = genomic DNA

SEQ ID NO: 63382 - DNA, 30 bp, Homo sapiens; identical to SEQ ID NO: 20850
  source 1..30: mol_type = genomic DNA

SEQ ID NO: 63383 - DNA, 29 bp, Homo sapiens
  source 1..29: mol_type = genomic DNA
gtcgctggttcgaatccggctcggaggac

SEQ ID NO: 63384 - DNA, 29 bp, Homo sapiens
  source 1..29: mol_type = genomic DNA
gtcgctggttcgaatccggctcgaaggac

SEQ ID NO: 63385 - DNA, 30 bp, Homo sapiens; identical to SEQ ID NO: 20845
  source 1..30: mol_type = genomic DNA

SEQ ID NO: 63386 - DNA, 28 bp, Homo sapiens
  source 1..28: mol_type = genomic DNA
gtcgcgggttcgatccccgtacgggcca

SEQ ID NO: 63387 - DNA, 29 bp, Homo sapiens
  source 1..29: mol_type = genomic DNA
gtcgcgagttcaaatctcgctggggcctc

SEQ ID NO: 63388 - DNA, 16 bp, Homo sapiens
  source 1..16: mol_type = genomic DNA
gtccctgtccaggcgc

SEQ ID NO: 63389 - DNA, 29 bp, Homo sapiens
  source 1..29: mol_type = genomic DNA
gtccctggttcgatcccgggtttcggcac

SEQ ID NO: 63390 - DNA, 23 bp, Homo sapiens
  source 1..23: mol_type = genomic DNA
gtatgattctcggtttgggtccg

SEQ ID NO: 63391 - DNA, 36 bp, Homo sapiens; identical to SEQ ID NO: 20597
  source 1..36: mol_type = genomic DNA

SEQ ID NO: 63392 - DNA, 43 bp, Homo sapiens; identical to SEQ ID NO: 20163
  source 1..43: mol_type = genomic DNA

SEQ ID NO: 63393 - DNA, 38 bp, Homo sapiens; identical to SEQ ID NO: 39029
  source 1..38: mol_type = genomic DNA

SEQ ID NO: 63394 - DNA, 31 bp, Homo sapiens; identical to SEQ ID NO: 20118
  source 1..31: mol_type = genomic DNA

SEQ ID NO: 63395 - DNA, 23 bp, Homo sapiens
  source 1..23: mol_type = genomic DNA
ggttcgattcctggtcagggaac

SEQ ID NO: 63396 - DNA, 38 bp, Homo sapiens; identical to SEQ ID NO: 19939
  source 1..38: mol_type = genomic DNA

SEQ ID NO: 63397 - DNA, 23 bp, Homo sapiens
  source 1..23: mol_type = genomic DNA
ggttcaatcccgggtttcggcac

SEQ ID NO: 63398 - DNA, 24 bp, Homo sapiens
  source 1..24: mol_type = genomic DNA
ggttcaaatcccggacgagccccc

SEQ ID NO: 63399 - DNA, 40 bp, Homo sapiens; identical to SEQ ID NO: 19702
  source 1..40: mol_type = genomic DNA

SEQ ID NO: 63400 - DNA, 31 bp, Homo sapiens; identical to SEQ ID NO: 19407
  source 1..31: mol_type = genomic DNA

SEQ ID NO: 63401 - DNA, 29 bp, Homo sapiens
  source 1..29: mol_type = genomic DNA
ggtcgcgggttcgatccccgtacgggcca

SEQ ID NO: 63402 - DNA, 41 bp, Homo sapiens; identical to SEQ ID NO: 19368
  source 1..41: mol_type = genomic DNA

SEQ ID NO: 63403 - DNA, 32 bp, Homo sapiens; identical to SEQ ID NO: 19351
  source 1..32: mol_type = genomic DNA

SEQ ID NO: 63404 - DNA, 19 bp, Homo sapiens
  source 1..19: mol_type = genomic DNA
ggtagctcagtcggtagag

SEQ ID NO: 63405 - DNA, 24 bp, Homo sapiens
  source 1..24: mol_type = genomic DNA
gggttcgattcccgggcggcgcac

SEQ ID NO: 63406 - DNA, 23 bp, Homo sapiens
  source 1..23: mol_type = genomic DNA
gggttcgattcccgggcggcgca

SEQ ID NO: 63407 - DNA, 22 bp, Homo sapiens
  source 1..22: mol_type = genomic DNA
gggttcgatccccgtacgggcc

SEQ ID NO: 63408 - DNA, 24 bp, Homo sapiens
  source 1..24: mol_type = genomic DNA
gggttcgaatcccaccgctgccac

SEQ ID NO: 63409 - DNA, 32 bp, Homo sapiens; identical to SEQ ID NO: 18927
  source 1..32: mol_type = genomic DNA

SEQ ID NO: 63410 - DNA, 31 bp, Homo sapiens; identical to SEQ ID NO: 18926
  source 1..31: mol_type = genomic DNA

SEQ ID NO: 63411 - DNA, 32 bp, Homo sapiens; identical to SEQ ID NO: 38396
  source 1..32: mol_type = genomic DNA

SEQ ID NO: 63412 - DNA, 32 bp, Homo sapiens; identical to SEQ ID NO: 18838
  source 1..32: mol_type = genomic DNA

SEQ ID NO: 63413 - DNA, 31 bp, Homo sapiens; identical to SEQ ID NO: 38288
  source 1..31: mol_type = genomic DNA

SEQ ID NO: 63414 - DNA, 33 bp, Homo sapiens; identical to SEQ ID NO: 18635
  source 1..33: mol_type = genomic DNA

SEQ ID NO: 63415 - DNA, 32 bp, Homo sapiens; identical to SEQ ID NO: 18566
  source 1..32: mol_type = genomic DNA

SEQ ID NO: 63416 - DNA, 31 bp, Homo sapiens; identical to SEQ ID NO: 18561
  source 1..31: mol_type = genomic DNA

SEQ ID NO: 63417 - DNA, 32 bp, Homo sapiens; identical to SEQ ID NO: 49044
  source 1..32: mol_type = genomic DNA

SEQ ID NO: 63418 - DNA, 30 bp, Homo sapiens; identical to SEQ ID NO: 18559
  source 1..30: mol_type = genomic DNA

SEQ ID NO: 63419 - DNA, 29 bp, Homo sapiens
  source 1..29: mol_type = genomic DNA
gggattgtgggttcgagtcccacccgggg

SEQ ID NO: 63420 - DNA, 18 bp, Homo sapiens
  source 1..18: mol_type = genomic DNA
gggagagcattagactga

SEQ ID NO: 63421 - DNA, 16 bp, Homo sapiens
  source 1..16: mol_type = genomic DNA
gggagagcattagact

SEQ ID NO: 63422 - DNA, 35 bp, Homo sapiens; identical to SEQ ID NO: 18512
  source 1..35: mol_type = genomic DNA

SEQ ID NO: 63423 - DNA, 36 bp, Homo sapiens; identical to SEQ ID NO: 18431
  source 1..36: mol_type = genomic DNA

SEQ ID NO: 63424 - DNA, 41 bp, Homo sapiens; identical to SEQ ID NO: 18202
  source 1..41: mol_type = genomic DNA

SEQ ID NO: 63425 - DNA, 40 bp, Homo sapiens; identical to SEQ ID NO: 18201
  source 1..40: mol_type = genomic DNA

SEQ ID NO: 63426 - DNA, 40 bp, Homo sapiens; identical to SEQ ID NO: 17963
  source 1..40: mol_type = genomic DNA

SEQ ID NO: 63427 - DNA, 46 bp, Homo sapiens; identical to SEQ ID NO: 17813
  source 1..46: mol_type = genomic DNA

SEQ ID NO: 63428 - DNA, 23 bp, Homo sapiens
  source 1..23: mol_type = genomic DNA
gcttagcggtagagcatttgact

SEQ ID NO: 63429 - DNA, 27 bp, Homo sapiens
  source 1..27: mol_type = genomic DNA
gctggttcgattccggctcgaaggacc

SEQ ID NO: 63430 - DNA, 26 bp, Homo sapiens
  source 1..26: mol_type = genomic DNA
gctggttcgaatccggctcggaggac

SEQ ID NO: 63431 - DNA, 26 bp, Homo sapiens
  source 1..26: mol_type = genomic DNA
gctggttcgaatccggctcgaaggac

SEQ ID NO: 63432 - DNA, 44 bp, Homo sapiens; identical to SEQ ID NO: 17470
  source 1..44: mol_type = genomic DNA

SEQ ID NO: 63433 - DNA, 26 bp, Homo sapiens
  source 1..26: mol_type = genomic DNA
gcgtgttcgaatcacgtcggggtcac

SEQ ID NO: 63434 - DNA, 25 bp, Homo sapiens
  source 1..25: mol_type = genomic DNA
gcgtgttcgaatcacgtcggggtca

SEQ ID NO: 63435 - DNA, 17 bp, Homo sapiens
  source 1..17: mol_type = genomic DNA
gcggcccgggttcgact

SEQ ID NO: 63436 - DNA, 17 bp, Homo sapiens
  source 1..17: mol_type = genomic DNA
gcctacccagggacgcc

SEQ ID NO: 63437 - DNA, 32 bp, Homo sapiens; identical to SEQ ID NO: 16814
  source 1..32: mol_type = genomic DNA

SEQ ID NO: 63438 - DNA, 30 bp, Homo sapiens; identical to SEQ ID NO: 37434
  source 1..30: mol_type = genomic DNA

SEQ ID NO: 63439 - DNA, 30 bp, Homo sapiens; identical to SEQ ID NO: 16772
  source 1..30: mol_type = genomic DNA

SEQ ID NO: 63440 - DNA, 41 bp, Homo sapiens; identical to SEQ ID NO: 16680
  source 1..41: mol_type = genomic DNA

SEQ ID NO: 63441 - DNA, 35 bp, Homo sapiens; identical to SEQ ID NO: 16464
  source 1..35: mol_type = genomic DNA

SEQ ID NO: 63442 - DNA, 33 bp, Homo sapiens; identical to SEQ ID NO: 37211
  source 1..33: mol_type = genomic DNA

SEQ ID NO: 63443 - DNA, 18 bp, Homo sapiens
  source 1..18: mol_type = genomic DNA
gattcccggccaatgcac

SEQ ID NO: 63444 - DNA, 36 bp, Homo sapiens; identical to SEQ ID NO: 16007
  source 1..36: mol_type = genomic DNA

SEQ ID NO: 63445 - DNA, 35 bp, Homo sapiens; identical to SEQ ID NO: 37088
  source 1..35: mol_type = genomic DNA

SEQ ID NO: 63446 - DNA, 18 bp, Homo sapiens
  source 1..18: mol_type = genomic DNA
gatcccgggcggaaacac

SEQ ID NO: 63447 - DNA, 17 bp, Homo sapiens
  source 1..17: mol_type = genomic DNA
gatccccgtacgggcca

SEQ ID NO: 63448 - DNA, 38 bp, Homo sapiens; identical to SEQ ID NO: 15951
  source 1..38: mol_type = genomic DNA

SEQ ID NO: 63449 - DNA, 39 bp, Homo sapiens; identical to SEQ ID NO: 15929
  source 1..39: mol_type = genomic DNA

SEQ ID NO: 63450 - DNA, 39 bp, Homo sapiens; identical to SEQ ID NO: 15924
  source 1..39: mol_type = genomic DNA

SEQ ID NO: 63451 - DNA, 24 bp, Homo sapiens
  source 1..24: mol_type = genomic DNA
gagttcaaatctcggtgggacctc

SEQ ID NO: 63452 - DNA, 23 bp, Homo sapiens
  source 1..23: mol_type = genomic DNA
gagttcaaatctcggtgggacct

SEQ ID NO: 63453 - DNA, 33 bp, Homo sapiens
  source 1..33: mol_type = genomic DNA
gaggtcccgggttcgatccccagcatctccacc

SEQ ID NO: 63454 - DNA, 32 bp, Homo sapiens; identical to SEQ ID NO: 36975
  source 1..32: mol_type = genomic DNA

SEQ ID NO: 63455 - DNA, 39 bp, Homo sapiens; identical to SEQ ID NO: 15644
  source 1..39: mol_type = genomic DNA

SEQ ID NO: 63456 - DNA, 18 bp, Homo sapiens
  source 1..18: mol_type = genomic DNA
gagcggtctaaggcgctg

SEQ ID NO: 63457 - DNA, 27 bp, Homo sapiens
  source 1..27: mol_type = genomic DNA
gagatgaaaacctttttccaaggacac

SEQ ID NO: 63458 - DNA, 19 bp, Homo sapiens
  source 1..19: mol_type = genomic DNA
gaatcctgttcgtgacgcc

SEQ ID NO: 63459 - DNA, 33 bp, Homo sapiens; identical to SEQ ID NO: 15179
  source 1..33: mol_type = genomic DNA

SEQ ID NO: 63460 - DNA, 33 bp, Homo sapiens; identical to SEQ ID NO: 15098
  source 1..33: mol_type = genomic DNA

SEQ ID NO: 63461 - DNA, 35 bp, Homo sapiens; identical to SEQ ID NO: 36730
  source 1..35: mol_type = genomic DNA

SEQ ID NO: 63462 - DNA, 35 bp, Homo sapiens; identical to SEQ ID NO: 14991
  source 1..35: mol_type = genomic DNA

SEQ ID NO: 63463 - DNA, 19 bp, Homo sapiens
  source 1..19: mol_type = genomic DNA
gaaaccgggcagaagcacc

SEQ ID NO: 63464 - DNA, 31 bp, Homo sapiens; identical to SEQ ID NO: 14909
  source 1..31: mol_type = genomic DNA

SEQ ID NO: 63465 - DNA, 37 bp, Homo sapiens; identical to SEQ ID NO: 14763
  source 1..37: mol_type = genomic DNA

SEQ ID NO: 63466 - DNA, 45 bp, Homo sapiens; identical to SEQ ID NO: 14698
  source 1..45: mol_type = genomic DNA

SEQ ID NO: 63467 - DNA, 44 bp, Homo sapiens; identical to SEQ ID NO: 14668
  source 1..44: mol_type = genomic DNA

SEQ ID NO: 63468 - DNA, 37 bp, Homo sapiens; identical to SEQ ID NO: 36634
  source 1..37: mol_type = genomic DNA

SEQ ID NO: 63469 - DNA, 17 bp, Homo sapiens
  source 1..17: mol_type = genomic DNA
cttccaagcagttgacc

SEQ ID NO: 63470 - DNA, 34 bp, Homo sapiens; identical to SEQ ID NO: 14599
  source 1..34: mol_type = genomic DNA

SEQ ID NO: 63471 - DNA, 34 bp, Homo sapiens; identical to SEQ ID NO: 14594
  source 1..34: mol_type = genomic DNA

SEQ ID NO: 63472 - DNA, 39 bp, Homo sapiens; identical to SEQ ID NO: 14506
  source 1..39: mol_type = genomic DNA

SEQ ID NO: 63473 - DNA, 43 bp, Homo sapiens; identical to SEQ ID NO: 14363
  source 1..43: mol_type = genomic DNA

SEQ ID NO: 63474 - DNA, 25 bp, Homo sapiens
  source 1..25: mol_type = genomic DNA
ctggttcgatcccgggtttcggcac

SEQ ID NO: 63475 - DNA, 26 bp, Homo sapiens
  source 1..26: mol_type = genomic DNA
ctgggttcgagccccagtggaaccac

SEQ ID NO: 63476 - DNA, 26 bp, Homo sapiens
  source 1..26: mol_type = genomic DNA
ctgggttcgaatcccagcggtgcctc

SEQ ID NO: 63477 - DNA, 39 bp, Homo sapiens; identical to SEQ ID NO: 36386
  source 1..39: mol_type = genomic DNA

SEQ ID NO: 63478 - DNA, 44 bp, Homo sapiens; identical to SEQ ID NO: 36333
  source 1..44: mol_type = genomic DNA

SEQ ID NO: 63479 - DNA, 44 bp, Homo sapiens; identical to SEQ ID NO: 13630
  source 1..44: mol_type = genomic DNA

SEQ ID NO: 63480 - DNA, 37 bp, Homo sapiens; identical to SEQ ID NO: 13542
  source 1..37: mol_type = genomic DNA

SEQ ID NO: 63481 - DNA, 31 bp, Homo sapiens; identical to SEQ ID NO: 36198
  source 1..31: mol_type = genomic DNA

SEQ ID NO: 63482 - DNA, 41 bp, Homo sapiens; identical to SEQ ID NO: 13265
  source 1..41: mol_type = genomic DNA

SEQ ID NO: 63483 - DNA, 41 bp, Homo sapiens; identical to SEQ ID NO: 13263
  source 1..41: mol_type = genomic DNA

SEQ ID NO: 63484 - DNA, 35 bp, Homo sapiens; identical to SEQ ID NO: 13101
  source 1..35: mol_type = genomic DNA

SEQ ID NO: 63485 - DNA, 33 bp, Homo sapiens; identical to SEQ ID NO: 13099
  source 1..33: mol_type = genomic DNA

SEQ ID NO: 63486 - DNA, 26 bp, Homo sapiens
  source 1..26: mol_type = genomic DNA
cgtgttcaaatcacgtcggggtcacc

SEQ ID NO: 63487 - DNA, 17 bp, Homo sapiens
  source 1..17: mol_type = genomic DNA
cgtggccgagcggtcta

SEQ ID NO: 63488 - DNA, 28 bp, Homo sapiens
  source 1..28: mol_type = genomic DNA
cgtagtgtagtggtcatcacgttcgcct

SEQ ID NO: 63489 - DNA, 25 bp, Homo sapiens
  source 1..25: mol_type = genomic DNA
cggttcgaaaccgggcggaaacacc

SEQ ID NO: 63490 - DNA, 22 bp, Homo sapiens
  source 1..22: mol_type = genomic DNA
cggttcgaaaccgggcggaaac

SEQ ID NO: 63491 - DNA, 28 bp, Homo sapiens
  source 1..28: mol_type = genomic DNA
cggttaggattcctggttttcacccagg

SEQ ID NO: 63492 - DNA, 19 bp, Homo sapiens
  source 1..19: mol_type = genomic DNA
cggtagagcatgagactct

SEQ ID NO: 63493 - DNA, 25 bp, Homo sapiens
  source 1..25: mol_type = genomic DNA
cgggttcgattcccgggcggcgcac

SEQ ID NO: 63494 - DNA, 25 bp, Homo sapiens
  source 1..25: mol_type = genomic DNA
cgggttcgatccccggcatctccac

SEQ ID NO: 63495 - DNA, 26 bp, Homo sapiens
  source 1..26: mol_type = genomic DNA
cgggttcgagtcccggcggagtcgcc

SEQ ID NO: 63496 - DNA, 24 bp, Homo sapiens
  source 1..24: mol_type = genomic DNA
cgggttcaaatcccggacgagccc

SEQ ID NO: 63497 - DNA, 26 bp, Homo sapiens
  source 1..26: mol_type = genomic DNA
cggggttcaagtccctgttcgggcgc

SEQ ID NO: 63498 - DNA, 33 bp, Homo sapiens; identical to SEQ ID NO: 12622
  source 1..33: mol_type = genomic DNA

SEQ ID NO: 63499 - DNA, 47 bp, Homo sapiens; identical to SEQ ID NO: 12540
  source 1..47: mol_type = genomic DNA

SEQ ID NO: 63500 - DNA, 31 bp, Homo sapiens; identical to SEQ ID NO: 12468
  source 1..31: mol_type = genomic DNA

SEQ ID NO: 63501 - DNA, 38 bp, Homo sapiens; identical to SEQ ID NO: 12444
  source 1..38: mol_type = genomic DNA

SEQ ID NO: 63502 - DNA, 36 bp, Homo sapiens; identical to SEQ ID NO: 12442
  source 1..36: mol_type = genomic DNA

SEQ ID NO: 63503 - DNA, 18 bp, Homo sapiens
  source 1..18: mol_type = genomic DNA
cggatagctcagtcggta

SEQ ID NO: 63504 - DNA, 27 bp, Homo sapiens
  source 1..27: mol_type = genomic DNA
cgctggttcgaatccggctcggaggac

SEQ ID NO: 63505 - DNA, 25 bp, Homo sapiens
  source 1..25: mol_type = genomic DNA
cgctggtgtagtggtatcatgcaag

SEQ ID NO: 63506 - DNA, 30 bp, Homo sapiens; identical to SEQ ID NO: 12289
  source 1..30: mol_type = genomic DNA

SEQ ID NO: 63507 - DNA, 29 bp, Homo sapiens
  source 1..29: mol_type = genomic DNA
cgcgggaggcccgggttcgattcccggcc

SEQ ID NO: 63508 - DNA, 37 bp, Homo sapiens; identical to SEQ ID NO: 12157
  source 1..37: mol_type = genomic DNA

SEQ ID NO: 63509 - DNA, 23 bp, Homo sapiens
  source 1..23: mol_type = genomic DNA
cgcagcggaagcgtgctgggccc

SEQ ID NO: 63510 - DNA, 28 bp, Homo sapiens
  source 1..28: mol_type = genomic DNA
cgcagaaggtcctgggttcgagccccag

SEQ ID NO: 63511 - DNA, 22 bp, Homo sapiens
  source 1..22: mol_type = genomic DNA
cgcaacggtagcgcgtctgact

SEQ ID NO: 63512 - DNA, 19 bp, Homo sapiens
  source 1..19: mol_type = genomic DNA
cgattcccggccaacgcac

SEQ ID NO: 63513 - DNA, 19 bp, Homo sapiens
  source 1..19: mol_type = genomic DNA
cgatccccgtacgggccac

SEQ ID NO: 63514 - DNA, 25 bp, Homo sapiens
  source 1..25: mol_type = genomic DNA
cgagttcgatcctcgctggggcctc

SEQ ID NO: 63515 - DNA, 20 bp, Homo sapiens
  source 1..20: mol_type = genomic DNA
cgagtcccttcgtggtcgcc

SEQ ID NO: 63516 - DNA, 18 bp, Homo sapiens
  source 1..18: mol_type = genomic DNA
cgagccccagtggaacca

SEQ ID NO: 63517 - DNA, 17 bp, Homo sapiens
  source 1..17: mol_type = genomic DNA
cgagccccagtggaacc

SEQ ID NO: 63518 - DNA, 18 bp, Homo sapiens
  source 1..18: mol_type = genomic DNA
cgaatctcggtgggacct

SEQ ID NO: 63519 - DNA, 19 bp, Homo sapiens
  source 1..19: mol_type = genomic DNA
cgaatcctgttcgtgacgc

SEQ ID NO: 63520 - DNA, 20 bp, Homo sapiens
  source 1..20: mol_type = genomic DNA
cgaatcccaccctcgtcgcc

SEQ ID NO: 63521 - DNA, 20 bp, Homo sapiens
  source 1..20: mol_type = genomic DNA
cgaatcccaccactgccacc

SEQ ID NO: 63522 - DNA, 20 bp, Homo sapiens
  source 1..20: mol_type = genomic DNA
cgaaccccgtacgggccacc

SEQ ID NO: 63523 - DNA, 36 bp, Homo sapiens; identical to SEQ ID NO: 35415
  source 1..36: mol_type = genomic DNA

SEQ ID NO: 63524 - DNA, 35 bp, Homo sapiens
  source 1..35: mol_type = genomic DNA
cgaaaggtccccggttcgatcccgggcggaaacac

SEQ ID NO: 63525 - DNA, 36 bp, Homo sapiens; identical to SEQ ID NO: 11650
  source 1..36: mol_type = genomic DNA

SEQ ID NO: 63526 - DNA, 17 bp, Homo sapiens
  source 1..17: mol_type = genomic DNA
cgaaaccgggcggaaac

SEQ ID NO: 63527 - DNA, 16 bp, Homo sapiens
  source 1..16: mol_type = genomic DNA
cgaaaccgggcggaaa

SEQ ID NO: 63528 - DNA, 18 bp, Homo sapiens
  source 1..18: mol_type = genomic DNA
cgaaaccgggcagaagca

SEQ ID NO: 63529 - DNA, 26 bp, Homo sapiens
  source 1..26: mol_type = genomic DNA
cctggttcaatcccgggtttcggcac

SEQ ID NO: 63530 - DNA, 45 bp, Homo sapiens; identical to SEQ ID NO: 35291
  source 1..45: mol_type = genomic DNA

SEQ ID NO: 63531 - DNA, 17 bp, Homo sapiens
  source 1..17: mol_type = genomic DNA
ccggttcgaaaccgggc

SEQ ID NO: 63532 - DNA, 22 bp, Homo sapiens
  source 1..22: mol_type = genomic DNA
ccgggttcgattcccgggcggc

SEQ ID NO: 63533 - DNA, 27 bp, Homo sapiens
  source 1..27: mol_type = genomic DNA
ccgggttcgatccccggcatctccacc

SEQ ID NO: 63534 - DNA, 28 bp, Homo sapiens
  source 1..28: mol_type = genomic DNA
ccggggttcaattccccgacggggagcc

SEQ ID NO: 63535 - DNA, 37 bp, Homo sapiens; identical to SEQ ID NO: 11143
  source 1..37: mol_type = genomic DNA

SEQ ID NO: 63536 - DNA, 28 bp, Homo sapiens
  source 1..28: mol_type = genomic DNA
ccgcgtggcctaatggataaggcgtctg

SEQ ID NO: 63537 - DNA, 25 bp, Homo sapiens
  source 1..25: mol_type = genomic DNA
ccgcggcccgggttcgattcccggt

SEQ ID NO: 63538 - DNA, 46 bp, Homo sapiens; identical to SEQ ID NO: 11024
  source 1..46: mol_type = genomic DNA

SEQ ID NO: 63539 - DNA, 47 bp, Homo sapiens; identical to SEQ ID NO: 11019
  source 1..47: mol_type = genomic DNA

SEQ ID NO: 63540 - DNA, 38 bp, Homo sapiens; identical to SEQ ID NO: 35078
  source 1..38: mol_type = genomic DNA

SEQ ID NO: 63541 - DNA, 36 bp, Homo sapiens; identical to SEQ ID NO: 10935
  source 1..36: mol_type = genomic DNA

SEQ ID NO: 63542 - DNA, 16 bp, Homo sapiens
  source 1..16: mol_type = genomic DNA
cccgggttcgactccc

SEQ ID NO: 63543 - DNA, 36 bp, Homo sapiens; identical to SEQ ID NO: 10431
  source 1..36: mol_type = genomic DNA

SEQ ID NO: 63544 - DNA, 37 bp, Homo sapiens; identical to SEQ ID NO: 10338
  source 1..37: mol_type = genomic DNA

SEQ ID NO: 63545 - DNA, 40 bp, Homo sapiens; identical to SEQ ID NO: 10297
  source 1..40: mol_type = genomic DNA

SEQ ID NO: 63546 - DNA, 35 bp, Homo sapiens; identical to SEQ ID NO: 10172
  source 1..35: mol_type = genomic DNA

SEQ ID NO: 63547 - DNA, 34 bp, Homo sapiens; identical to SEQ ID NO: 10095
  source 1..34: mol_type = genomic DNA

SEQ ID NO: 63548 - DNA, 38 bp, Homo sapiens; identical to SEQ ID NO: 9967
  source 1..38: mol_type = genomic DNA

SEQ ID NO: 63549 - DNA, 35 bp, Homo sapiens; identical to SEQ ID NO: 9956
  source 1..35: mol_type = genomic DNA

SEQ ID NO: 63550 - DNA, 38 bp, Homo sapiens; identical to SEQ ID NO: 9926
  source 1..38: mol_type = genomic DNA

SEQ ID NO: 63551 - DNA, 45 bp, Homo sapiens; identical to SEQ ID NO: 9823
  source 1..45: mol_type = genomic DNA

SEQ ID NO: 63552 - DNA, 44 bp, Homo sapiens; identical to SEQ ID NO: 9822
  source 1..44: mol_type = genomic DNA

SEQ ID NO: 63553 - DNA, 43 bp, Homo sapiens; identical to SEQ ID NO: 9821
  source 1..43: mol_type = genomic DNA

SEQ ID NO: 63554 - DNA, 36 bp, Homo sapiens; identical to SEQ ID NO: 34490
  source 1..36: mol_type = genomic DNA

SEQ ID NO: 63555 - DNA, 37 bp, Homo sapiens; identical to SEQ ID NO: 9491
  source 1..37: mol_type = genomic DNA

SEQ ID NO: 63556 - DNA, 29 bp, Homo sapiens
  source 1..29: mol_type = genomic DNA
catatggtctagcggttaggattcctggt

SEQ ID NO: 63557 - DNA, 27 bp, Homo sapiens
  source 1..27: mol_type = genomic DNA
catagtgtagtggttatcacgtctgct

SEQ ID NO: 63558 - DNA, 41 bp, Homo sapiens; identical to SEQ ID NO: 9430
  source 1..41: mol_type = genomic DNA

SEQ ID NO: 63559 - DNA, 21 bp, Homo sapiens
  source 1..21: mol_type = genomic DNA
cagttggttagagcgtggtgc

SEQ ID NO: 63560 - DNA, 43 bp, Homo sapiens; identical to SEQ ID NO: 9261
  source 1..43: mol_type = genomic DNA

SEQ ID NO: 63561 - DNA, 29 bp, Homo sapiens
  source 1..29: mol_type = genomic DNA
cagtcggtagagcatgagactcttaatct

SEQ ID NO: 63562 - DNA, 20 bp, Homo sapiens
  source 1..20: mol_type = genomic DNA
cagtcggtagagcataagac

SEQ ID NO: 63563 - DNA, 26 bp, Homo sapiens
  source 1..26: mol_type = genomic DNA
caggttcgaatcctgttcgtgacgcc

SEQ ID NO: 63564 - DNA, 35 bp, Homo sapiens; identical to SEQ ID NO: 9089
  source 1..35: mol_type = genomic DNA

SEQ ID NO: 63565 - DNA, 33 bp, Homo sapiens; identical to SEQ ID NO: 9087
  source 1..33: mol_type = genomic DNA

SEQ ID NO: 63566 - DNA, 34 bp, Homo sapiens; identical to SEQ ID NO: 9059
  source 1..34: mol_type = genomic DNA

SEQ ID NO: 63567 - DNA, 36 bp, Homo sapiens; identical to SEQ ID NO: 9040
  source 1..36: mol_type = genomic DNA

SEQ ID NO: 63568 - DNA, 25 bp, Homo sapiens
  source 1..25: mol_type = genomic DNA
caggcggcccgggttcgactcccgg

SEQ ID NO: 63569 - DNA, 21 bp, Homo sapiens
  source 1..21: mol_type = genomic DNA
caggcggcccgggttcgactc

SEQ ID NO: 63570 - DNA, 24 bp, Homo sapiens
  source 1..24: mol_type = genomic DNA
caggatggccgagtggtctaaggc

SEQ ID NO: 63571 - DNA, 33 bp, Homo sapiens; identical to SEQ ID NO: 8807
  source 1..33: mol_type = genomic DNA

SEQ ID NO: 63572 - DNA, 36 bp, Homo sapiens; identical to SEQ ID NO: 8601
  source 1..36: mol_type = genomic DNA

SEQ ID NO: 63573 - DNA, 36 bp, Homo sapiens; identical to SEQ ID NO: 8583
  source 1..36: mol_type = genomic DNA

SEQ ID NO: 63574 - DNA, 35 bp, Homo sapiens; identical to SEQ ID NO: 8582
  source 1..35: mol_type = genomic DNA

SEQ ID NO: 63575 - DNA, 33 bp, Homo sapiens; identical to SEQ ID NO: 8581
  source 1..33: mol_type = genomic DNA

SEQ ID NO: 63576 - DNA, 32 bp, Homo sapiens; identical to SEQ ID NO: 8394
  source 1..32: mol_type = genomic DNA

SEQ ID NO: 63577 - DNA, 32 bp, Homo sapiens; identical to SEQ ID NO: 8204
  source 1..32: mol_type = genomic DNA

SEQ ID NO: 63578 - DNA, 36 bp, Homo sapiens; identical to SEQ ID NO: 8106
  source 1..36: mol_type = genomic DNA

SEQ ID NO: 63579 - DNA, 39 bp, Homo sapiens; identical to SEQ ID NO: 8030
  source 1..39: mol_type = genomic DNA

SEQ ID NO: 63580 - DNA, 40 bp, Homo sapiens; identical to SEQ ID NO: 7958
  source 1..40: mol_type = genomic DNA

SEQ ID NO: 63581 - DNA, 21 bp, Homo sapiens
  source 1..21: mol_type = genomic DNA
caaatggtagagcgctcgctt

SEQ ID NO: 63582 - DNA, 18 bp, Homo sapiens
  source 1..18: mol_type = genomic DNA
caaatctcggtgggacct

SEQ ID NO: 63583 - DNA, 35 bp, Homo sapiens; identical to SEQ ID NO: 7816
  source 1..35: mol_type = genomic DNA

SEQ ID NO: 63584 - DNA, 30 bp, Homo sapiens; identical to SEQ ID NO: 7630
  source 1..30: mol_type = genomic DNA

SEQ ID NO: 63585 - DNA, 29 bp, Homo sapiens
  source 1..29: mol_type = genomic DNA
attgtgggttcgagtcccatctggggtgc

SEQ ID NO: 63586 - DNA, 42 bp, Homo sapiens; identical to SEQ ID NO: 7620
  source 1..42: mol_type = genomic DNA

SEQ ID NO: 63587 - DNA, 29 bp, Homo sapiens
  source 1..29: mol_type = genomic DNA
attgcaggttcgagtcctgccgcggtcgc

SEQ ID NO: 63588 - DNA, 30 bp, Homo sapiens; identical to SEQ ID NO: 7470
  source 1..30: mol_type = genomic DNA

SEQ ID NO: 63589 - DNA, 29 bp, Homo sapiens
  source 1..29: mol_type = genomic DNA
attgagggttcgaatcccttcgtggttgc

SEQ ID NO: 63590 - DNA, 17 bp, Homo sapiens
  source 1..17: mol_type = genomic DNA
attctcggtttgggtcc

SEQ ID NO: 63591 - DNA, 25 bp, Homo sapiens
  source 1..25: mol_type = genomic DNA
attcggcgctctcaccgccgcggcc

SEQ ID NO: 63592 - DNA, 17 bp, Homo sapiens
  source 1..17: mol_type = genomic DNA
attcggcgctctcaccg

SEQ ID NO: 63593 - DNA, 35 bp, Homo sapiens; identical to SEQ ID NO: 7382
  source 1..35: mol_type = genomic DNA

SEQ ID NO: 63594 - DNA, 17 bp, Homo sapiens
  source 1..17: mol_type = genomic DNA
attccctgacggggagc

SEQ ID NO: 63595 - DNA, 18 bp, Homo sapiens
  source 1..18: mol_type = genomic DNA
attcccgggcggcgcacc

SEQ ID NO: 63596 - DNA, 17 bp, Homo sapiens
  source 1..17: mol_type = genomic DNA
attcccggccaacgcac

SEQ ID NO: 63597 - DNA, 23 bp, Homo sapiens
  source 1..23: mol_type = genomic DNA
atggatcgaaaccatcctctgct

SEQ ID NO: 63598 - DNA, 35 bp, Homo sapiens; identical to SEQ ID NO: 6796
  source 1..35: mol_type = genomic DNA

SEQ ID NO: 63599 - DNA, 24 bp, Homo sapiens
  source 1..24: mol_type = genomic DNA
atgaaaacctttttccaaggacac

SEQ ID NO: 63600 - DNA, 39 bp, Homo sapiens; identical to SEQ ID NO: 6682
  source 1..39: mol_type = genomic DNA

SEQ ID NO: 63601 - DNA, 22 bp, Homo sapiens
  source 1..22: mol_type = genomic DNA
atctaaaccatcctctgctacc

SEQ ID NO: 63602 - DNA, 43 bp, Homo sapiens; identical to SEQ ID NO: 6646
  source 1..43: mol_type = genomic DNA

SEQ ID NO: 63603 - DNA, 20 bp, Homo sapiens
  source 1..20: mol_type = genomic DNA
atcgaaaccatcctctgcta

SEQ ID NO: 63604 - DNA, 28 bp, Homo sapiens
  source 1..28: mol_type = genomic DNA
atccgagttcaaatctcggtgggacctc

SEQ ID NO: 63605 - DNA, 17 bp, Homo sapiens
  source 1..17: mol_type = genomic DNA
atccccgtacgggccac

SEQ ID NO: 63606 - DNA, 47 bp, Homo sapiens; identical to SEQ ID NO: 6484
  source 1..47: mol_type = genomic DNA

SEQ ID NO: 63607 - DNA, 47 bp, Homo sapiens; identical to SEQ ID NO: 6455
  source 1..47: mol_type = genomic DNA

SEQ ID NO: 63608 - DNA, 38 bp, Homo sapiens; identical to SEQ ID NO: 6354
  source 1..38: mol_type = genomic DNA

SEQ ID NO: 63609 - DNA, 36 bp, Homo sapiens; identical to SEQ ID NO: 6352
  source 1..36: mol_type = genomic DNA

SEQ ID NO: 63610 - DNA, 38 bp, Homo sapiens; identical to SEQ ID NO: 6336
  source 1..38: mol_type = genomic DNA

SEQ ID NO: 63611 - DNA, 37 bp, Homo sapiens; identical to SEQ ID NO: 6335
  source 1..37: mol_type = genomic DNA

SEQ ID NO: 63612 - DNA, 32 bp, Homo sapiens; identical to SEQ ID NO: 6228
  source 1..32: mol_type = genomic DNA

SEQ ID NO: 63613 - DNA, 38 bp, Homo sapiens; identical to SEQ ID NO: 6160
  source 1..38: mol_type = genomic DNA

SEQ ID NO: 63614 - DNA, 41 bp, Homo sapiens; identical to SEQ ID NO: 5967
  source 1..41: mol_type = genomic DNA

SEQ ID NO: 63615 - DNA, 18 bp, Homo sapiens
  source 1..18: mol_type = genomic DNA
agtggcgcagcggaagcg

SEQ ID NO: 63616 - DNA, 18 bp, Homo sapiens
  source 1..18: mol_type = genomic DNA
agtccctgttcgggcgcc

SEQ ID NO: 63617 - DNA, 17 bp, Homo sapiens
  source 1..17: mol_type = genomic DNA
agtccctgttcgggcgc

SEQ ID NO: 63618 - DNA, 17 bp, Homo sapiens
  source 1..17: mol_type = genomic DNA
agtcccggcggagtcgc

SEQ ID NO: 63619 - DNA, 32 bp, Homo sapiens; identical to SEQ ID NO: 5257
  source 1..32: mol_type = genomic DNA

SEQ ID NO: 63620 - DNA, 20 bp, Homo sapiens
  source 1..20: mol_type = genomic DNA
aggttcgactcctggctggc

SEQ ID NO: 63621 - DNA, 31 bp, Homo sapiens; identical to SEQ ID NO: 5228
  source 1..31: mol_type = genomic DNA

SEQ ID NO: 63622 - DNA, 33 bp, Homo sapiens; identical to SEQ ID NO: 5217
  source 1..33: mol_type = genomic DNA

SEQ ID NO: 63623 - DNA, 18 bp, Homo sapiens
  source 1..18: mol_type = genomic DNA
aggtcgtgagttcgagcc

SEQ ID NO: 63624 - DNA, 32 bp, Homo sapiens; identical to SEQ ID NO: 5167
  source 1..32: mol_type = genomic DNA

SEQ ID NO: 63625 - DNA, 31 bp, Homo sapiens; identical to SEQ ID NO: 5166
  source 1..31: mol_type = genomic DNA

SEQ ID NO: 63626 - DNA, 31 bp, Homo sapiens; identical to SEQ ID NO: 5138
  source 1..31: mol_type = genomic DNA

SEQ ID NO: 63627 - DNA, 32 bp, Homo sapiens; identical to SEQ ID NO: 5134
  source 1..32: mol_type = genomic DNA

SEQ ID NO: 63628 - DNA, 32 bp, Homo sapiens; identical to SEQ ID NO: 32760
  source 1..32: mol_type = genomic DNA

SEQ ID NO: 63629 - DNA, 26 bp, Homo sapiens
  source 1..26: mol_type = genomic DNA
agggttcaagtccctgttcgggcgcc

SEQ ID NO: 63630 - DNA, 33 bp, Homo sapiens; identical to SEQ ID NO: 5063
  source 1..33: mol_type = genomic DNA

SEQ ID NO: 63631 - DNA, 35 bp, Homo sapiens; identical to SEQ ID NO: 5027
  source 1..35: mol_type = genomic DNA

SEQ ID NO: 63632 - DNA, 34 bp, Homo sapiens; identical to SEQ ID NO: 5026
  source 1..34: mol_type = genomic DNA

SEQ ID NO: 63633 - DNA, 33 bp, Homo sapiens; identical to SEQ ID NO: 5016
  source 1..33: mol_type = genomic DNA

SEQ ID NO: 63634 - DNA, 27 bp, Homo sapiens
  source 1..27: mol_type = genomic DNA
aggcggcccgggttcgactcccggtgt

SEQ ID NO: 63635 - DNA, 24 bp, Homo sapiens
  source 1..24: mol_type = genomic DNA
aggcggcccgggttcgactcccgg

SEQ ID NO: 63636 - DNA, 24 bp, Homo sapiens
  source 1..24: mol_type = genomic DNA
aggactgtagatccttaggtcgct

SEQ ID NO: 63637 - DNA, 32 bp, Homo sapiens
  source 1..32: mol_type = genomic DNA
agcggttaggattcctggttttcacccaggtg

SEQ ID NO: 63638 - DNA, 29 bp, Homo sapiens
  source 1..29: mol_type = genomic DNA
agcggttaggattcctggttttcacccag

SEQ ID NO: 63639 - DNA, 21 bp, Homo sapiens
  source 1..21: mol_type = genomic DNA
agcggaagcgtgctgggccca

SEQ ID NO: 63640 - DNA, 17 bp, Homo sapiens
  source 1..17: mol_type = genomic DNA
agccccagtggaaccac

SEQ ID NO: 63641 - DNA, 19 bp, Homo sapiens
  source 1..19: mol_type = genomic DNA
agcatgggactcttcatcc

SEQ ID NO: 63642 - DNA, 18 bp, Homo sapiens
  source 1..18: mol_type = genomic DNA
agcatgagactcttaatc

SEQ ID NO: 63643 - DNA, 29 bp, Homo sapiens
  source 1..29: mol_type = genomic DNA
agattgcaggttcgagtcctgccgcggtc

SEQ ID NO: 63644 - DNA, 31 bp, Homo sapiens; identical to SEQ ID NO: 4116
  source 1..31: mol_type = genomic DNA

SEQ ID NO: 63645 - DNA, 26 bp, Homo sapiens
  source 1..26: mol_type = genomic DNA
agatgaaaacctttttccaaggacac

SEQ ID NO: 63646 - DNA, 35 bp, Homo sapiens
  source 1..35: mol_type = genomic DNA
agaggtcgatggatcgaaaccatcctctgctacca

SEQ ID NO: 63647 - DNA, 31 bp, Homo sapiens; identical to SEQ ID NO: 3852
  source 1..31: mol_type = genomic DNA

SEQ ID NO: 63648 - DNA, 34 bp, Homo sapiens; identical to SEQ ID NO: 32295
  source 1..34: mol_type = genomic DNA

SEQ ID NO: 63649 - DNA, 32 bp, Homo sapiens; identical to SEQ ID NO: 3777
  source 1..32: mol_type = genomic DNA

SEQ ID NO: 63650 - DNA, 35 bp, Homo sapiens; identical to SEQ ID NO: 3731
  source 1..35: mol_type = genomic DNA

SEQ ID NO: 63651 - DNA, 34 bp, Homo sapiens; identical to SEQ ID NO: 3730
  source 1..34: mol_type = genomic DNA

SEQ ID NO: 63652 - DNA, 45 bp, Homo sapiens; identical to SEQ ID NO: 32206
  source 1..45: mol_type = genomic DNA

SEQ ID NO: 63653 - DNA, 42 bp, Homo sapiens
  source 1..42: mol_type = genomic DNA
actctgaatccagcgatccgagttcaaatctcggtggaacct

SEQ ID NO: 63654 - DNA, 30 bp, Homo sapiens; identical to SEQ ID NO: 3185
  source 1..30: mol_type = genomic DNA

SEQ ID NO: 63655 - DNA, 28 bp, Homo sapiens
  source 1..28: mol_type = genomic DNA
accggggttcaattccccgacggggagc

SEQ ID NO: 63656 - DNA, 28 bp, Homo sapiens
  source 1..28: mol_type = genomic DNA
acccgggttcgattcccgggcggcgcac

SEQ ID NO: 63657 - DNA, 16 bp, Homo sapiens
  source 1..16: mol_type = genomic DNA
accccgtacgggccac

SEQ ID NO: 63658 - DNA, 43 bp, Homo sapiens; identical to SEQ ID NO: 2831
  source 1..43: mol_type = genomic DNA

SEQ ID NO: 63659 - DNA, 31 bp, Homo sapiens; identical to SEQ ID NO: 2705
  source 1..31: mol_type = genomic DNA

SEQ ID NO: 63660 - DNA, 19 bp, Homo sapiens
  source 1..19: mol_type = genomic DNA
aattccccgacggggagcc

SEQ ID NO: 63661 - DNA, 39 bp, Homo sapiens; identical to SEQ ID NO: 2341
  source 1..39: mol_type = genomic DNA

SEQ ID NO: 63662 - DNA, 16 bp, Homo sapiens
  source 1..16: mol_type = genomic DNA
aatctcggtgggacct

SEQ ID NO: 63663 - DNA, 18 bp, Homo sapiens
  source 1..18: mol_type = genomic DNA
aatctcgctggggcctcc

SEQ ID NO: 63664 - DNA, 17 bp, Homo sapiens
  source 1..17: mol_type = genomic DNA
aatctcgctggggcctc

SEQ ID NO: 63665 - DNA, 16 bp, Homo sapiens
  source 1..16: mol_type = genomic DNA
aatctcgctggggcct

SEQ ID NO: 63666 - DNA, 39 bp, Homo sapiens; identical to SEQ ID NO: 1989
  source 1..39: mol_type = genomic DNA

SEQ ID NO: 63667 - DNA, 16 bp, Homo sapiens
  source 1..16: mol_type = genomic DNA
aatcccaccgctgcca

SEQ ID NO: 63668 - DNA, 19 bp, Homo sapiens
  source 1..19: mol_type = genomic DNA
aagtccctgttcgggcgcc

SEQ ID NO: 63669 - DNA, 33 bp, Homo sapiens; identical to SEQ ID NO: 1670
  source 1..33: mol_type = genomic DNA

SEQ ID NO: 63670 - DNA, 32 bp, Homo sapiens; identical to SEQ ID NO: 1653
  source 1..32: mol_type = genomic DNA

SEQ ID NO: 63671 - DNA, 33 bp, Homo sapiens; identical to SEQ ID NO: 1645
  source 1..33: mol_type = genomic DNA

SEQ ID NO: 63672 - DNA, 32 bp, Homo sapiens; identical to SEQ ID NO: 1634
  source 1..32: mol_type = genomic DNA

SEQ ID NO: 63673 - DNA, 32 bp, Homo sapiens; identical to SEQ ID NO: 1633
  source 1..32: mol_type = genomic DNA

SEQ ID NO: 63674 - DNA, 31 bp, Homo sapiens; identical to SEQ ID NO: 31607
  source 1..31: mol_type = genomic DNA

SEQ ID NO: 63675 - DNA, 30 bp, Homo sapiens; identical to SEQ ID NO: 1632
  source 1..30: mol_type = genomic DNA

SEQ ID NO: 63676 - DNA, 33 bp, Homo sapiens; identical to SEQ ID NO: 1576
  source 1..33: mol_type = genomic DNA

SEQ ID NO: 63677 - DNA, 27 bp, Homo sapiens
  source 1..27: mol_type = genomic DNA
aagcagcttcaaacctgccggggcttc

SEQ ID NO: 63678 - DNA, 34 bp, Homo sapiens; identical to SEQ ID NO: 1380
  source 1..34: mol_type = genomic DNA

SEQ ID NO: 63679 - DNA, 32 bp, Homo sapiens; identical to SEQ ID NO: 1378
  source 1..32: mol_type = genomic DNA

SEQ ID NO: 63680 - DNA, 32 bp, Homo sapiens; identical to SEQ ID NO: 1371
  source 1..32: mol_type = genomic DNA

SEQ ID NO: 63681 - DNA, 33 bp, Homo sapiens; identical to SEQ ID NO: 1365
  source 1..33: mol_type = genomic DNA

SEQ ID NO: 63682 - DNA, 33 bp, Homo sapiens; identical to SEQ ID NO: 1362
  source 1..33: mol_type = genomic DNA

SEQ ID NO: 63683 - DNA, 16 bp, Homo sapiens
  source 1..16: mol_type = genomic DNA
aaccgggcagaaacac

SEQ ID NO: 63684 - DNA, 17 bp, Homo sapiens
  source 1..17: mol_type = genomic DNA
aaccccgtccgtgcctc

SEQ ID NO: 63685 - DNA, 16 bp, Homo sapiens
  source 1..16: mol_type = genomic DNA
aaccaggcggaaacac

SEQ ID NO: 63686 - DNA, 17 bp, Homo sapiens
  source 1..17: mol_type = genomic DNA
aaatctcggtgggacct

SEQ ID NO: 63687 - DNA, 34 bp, Homo sapiens; identical to SEQ ID NO: 455
  source 1..34: mol_type = genomic DNA

SEQ ID NO: 63688 - DNA, 33 bp, Homo sapiens; identical to SEQ ID NO: 444
  source 1..33: mol_type = genomic DNA

SEQ ID NO: 63689 - DNA, 33 bp, Homo sapiens; identical to SEQ ID NO: 31309
  source 1..33: mol_type = genomic DNA

SEQ ID NO: 63690 - DNA, 32 bp, Homo sapiens; identical to SEQ ID NO: 31308
  source 1..32: mol_type = genomic DNA

SEQ ID NO: 63691 - DNA, 18 bp, Homo sapiens
  source 1..18: mol_type = genomic DNA
aaaccgggcagaagcacc

SEQ ID NO: 63692 - DNA, 37 bp, Homo sapiens; identical to SEQ ID NO: 30923
  source 1..37: mol_type = genomic DNA

SEQ ID NO: 63693 - DNA, 42 bp, Homo sapiens; identical to SEQ ID NO: 43037
  source 1..42: mol_type = genomic DNA

SEQ ID NO: 63694 - DNA, 45 bp, Homo sapiens; identical to SEQ ID NO: 42950
  source 1..45: mol_type = genomic DNA

SEQ ID NO: 63695 - DNA, 43 bp, Homo sapiens; identical to SEQ ID NO: 42929
  source 1..43: mol_type = genomic DNA

SEQ ID NO: 63696 - DNA, 18 bp, Homo sapiens
  source 1..18: mol_type = genomic DNA
ttcgattcccggccaacg

SEQ ID NO: 63697 - DNA, 36 bp, Homo sapiens; identical to SEQ ID NO: 29983
  source 1..36: mol_type = genomic DNA

SEQ ID NO: 63698 - DNA, 35 bp, Homo sapiens; identical to SEQ ID NO: 29703
  source 1..35: mol_type = genomic DNA

SEQ ID NO: 63699 - DNA, 40 bp, Homo sapiens; identical to SEQ ID NO: 29529
  source 1..40: mol_type = genomic DNA

SEQ ID NO: 63700 - DNA, 36 bp, Homo sapiens; identical to SEQ ID NO: 42660
  source 1..36: mol_type = genomic DNA

SEQ ID NO: 63701 - DNA, 36 bp, Homo sapiens; identical to SEQ ID NO: 42451
  source 1..36: mol_type = genomic DNA

SEQ ID NO: 63702 - DNA, 41 bp, Homo sapiens; identical to SEQ ID NO: 28550
  source 1..41: mol_type = genomic DNA

SEQ ID NO: 63703 - DNA, 36 bp, Homo sapiens; identical to SEQ ID NO: 28541
  source 1..36: mol_type = genomic DNA

SEQ ID NO: 63704 - DNA, 33 bp, Homo sapiens; identical to SEQ ID NO: 28279
  source 1..33: mol_type = genomic DNA

SEQ ID NO: 63705 - DNA, 45 bp, Homo sapiens; identical to SEQ ID NO: 28045
  source 1..45: mol_type = genomic DNA

SEQ ID NO: 63706 - DNA, 21 bp, Homo sapiens
  source 1..21: mol_type = genomic DNA
tgggttcgaatcccagcggtg

SEQ ID NO: 63707 - DNA, 24 bp, Homo sapiens
  source 1..24: mol_type = genomic DNA
tggggattgtgggttcgagtccca

SEQ ID NO: 63708 - DNA, 38 bp, Homo sapiens; identical to SEQ ID NO: 27496
  source 1..38: mol_type = genomic DNA

SEQ ID NO: 63709 - DNA, 35 bp, Homo sapiens; identical to SEQ ID NO: 26879
  source 1..35: mol_type = genomic DNA

SEQ ID NO: 63710 - DNA, 36 bp, Homo sapiens; identical to SEQ ID NO: 26872
  source 1..36: mol_type = genomic DNA

SEQ ID NO: 63711 - DNA, 36 bp, Homo sapiens; identical to SEQ ID NO: 26864
  source 1..36: mol_type = genomic DNA

SEQ ID NO: 63712 - DNA, 35 bp, Homo sapiens; identical to SEQ ID NO: 26797
  source 1..35: mol_type = genomic DNA

SEQ ID NO: 63713 - DNA, 36 bp, Homo sapiens; identical to SEQ ID NO: 26773
  source 1..36: mol_type = genomic DNA

SEQ ID NO: 63714 - DNA, 35 bp, Homo sapiens; identical to SEQ ID NO: 26765
  source 1..35: mol_type = genomic DNA

SEQ ID NO: 63715 - DNA, 17 bp, Homo sapiens
  source 1..17: mol_type = genomic DNA
tcgattcccggccaacg

SEQ ID NO: 63716 - DNA, 20 bp, Homo sapiens
  source 1..20: mol_type = genomic DNA
tcgagtcccttcgtggtcgc

SEQ ID NO: 63717 - DNA, 20 bp, Homo sapiens
  source 1..20: mol_type = genomic DNA
tcgaatcctgttcgtgacgc

SEQ ID NO: 63718 - DNA, 35 bp, Homo sapiens; identical to SEQ ID NO: 25745
  source 1..35: mol_type = genomic DNA

SEQ ID NO: 63719 - DNA, 43 bp, Homo sapiens; identical to SEQ ID NO: 41033
  source 1..43: mol_type = genomic DNA

SEQ ID NO: 63720 - DNA, 16 bp, Homo sapiens
  source 1..16: mol_type = genomic DNA
tcaggatggccgagtg

SEQ ID NO: 63721 - DNA, 33 bp, Homo sapiens; identical to SEQ ID NO: 24951
  source 1..33: mol_type = genomic DNA

SEQ ID NO: 63722 - DNA, 36 bp, Homo sapiens; identical to SEQ ID NO: 24723
  source 1..36: mol_type = genomic DNA

SEQ ID NO: 63723 - DNA, 35 bp, Homo sapiens; identical to SEQ ID NO: 24722
  source 1..35: mol_type = genomic DNA

SEQ ID NO: 63724 - DNA, 35 bp, Homo sapiens; identical to SEQ ID NO: 24649
  source 1..35: mol_type = genomic DNA

SEQ ID NO: 63725 - DNA, 36 bp, Homo sapiens; identical to SEQ ID NO: 24647
  source 1..36: mol_type = genomic DNA

SEQ ID NO: 63726 - DNA, 35 bp, Homo sapiens; identical to SEQ ID NO: 24646
  source 1..35: mol_type = genomic DNA

SEQ ID NO: 63727 - DNA, 34 bp, Homo sapiens; identical to SEQ ID NO: 24642
  source 1..34: mol_type = genomic DNA

SEQ ID NO: 63728 - DNA, 32 bp, Homo sapiens; identical to SEQ ID NO: 24640
  source 1..32: mol_type = genomic DNA

SEQ ID NO: 63729 - DNA, 47 bp, Homo sapiens; identical to SEQ ID NO: 24606
  source 1..47: mol_type = genomic DNA

SEQ ID NO: 63730 - DNA, 27 bp, Homo sapiens
  source 1..27: mol_type = genomic DNA
tatggtctagcggttaggattcctggt

SEQ ID NO: 63731 - DNA, 35 bp, Homo sapiens; identical to SEQ ID NO: 24531
  source 1..35: mol_type = genomic DNA

SEQ ID NO: 63732 - DNA, 42 bp, Homo sapiens; identical to SEQ ID NO: 24266
  source 1..42: mol_type = genomic DNA

SEQ ID NO: 63733 - DNA, 16 bp, Homo sapiens
  source 1..16: mol_type = genomic DNA
tagagcatttgactgc

SEQ ID NO: 63734 - DNA, 25 bp, Homo sapiens
  source 1..25: mol_type = genomic DNA
gtgttcaagtcacgtcggggtcacc

SEQ ID NO: 63735 - DNA, 33 bp, Homo sapiens; identical to SEQ ID NO: 39346
  source 1..33: mol_type = genomic DNA

SEQ ID NO: 63736 - DNA, 30 bp, Homo sapiens; identical to SEQ ID NO: 20845
  source 1..30: mol_type = genomic DNA

SEQ ID NO: 63737 - DNA, 40 bp, Homo sapiens; identical to SEQ ID NO: 20625
  source 1..40: mol_type = genomic DNA

SEQ ID NO: 63738 - DNA, 36 bp, Homo sapiens; identical to SEQ ID NO: 20597
  source 1..36: mol_type = genomic DNA

SEQ ID NO: 63739 - DNA, 35 bp, Homo sapiens; identical to SEQ ID NO: 20587
  source 1..35: mol_type = genomic DNA

SEQ ID NO: 63740 - DNA, 34 bp, Homo sapiens; identical to SEQ ID NO: 20393
  source 1..34: mol_type = genomic DNA

SEQ ID NO: 63741 - DNA, 29 bp, Homo sapiens
  source 1..29: mol_type = genomic DNA
ggtccccggttcgaaaccgggcggaaaca

SEQ ID NO: 63742 - DNA, 22 bp, Homo sapiens
  source 1..22: mol_type = genomic DNA
gggttcgattcccggtcaggaa

SEQ ID NO: 63743 - DNA, 24 bp, Homo sapiens
  source 1..24: mol_type = genomic DNA
gggttcgaatcccaccgctgccac

SEQ ID NO: 63744 - DNA, 24 bp, Homo sapiens
  source 1..24: mol_type = genomic DNA
gggttcaagtccctgtccaggcgc

SEQ ID NO: 63745 - DNA, 26 bp, Homo sapiens
  source 1..26: mol_type = genomic DNA
gggttagagcactggtcttgtaaacc

SEQ ID NO: 63746 - DNA, 33 bp, Homo sapiens; identical to SEQ ID NO: 38314
  source 1..33: mol_type = genomic DNA

SEQ ID NO: 63747 - DNA, 17 bp, Homo sapiens
  source 1..17: mol_type = genomic DNA
ggagagcattagactga

SEQ ID NO: 63748 - DNA, 24 bp, Homo sapiens
  source 1..24: mol_type = genomic DNA
gcggaagcgtgctgggcccataac

SEQ ID NO: 63749 - DNA, 32 bp, Homo sapiens; identical to SEQ ID NO: 60131
  source 1..32: mol_type = genomic DNA

SEQ ID NO: 63750 - DNA, 28 bp, Homo sapiens
  source 1..28: mol_type = genomic DNA
gcgatccgagttcaaatctcggtgggac

SEQ ID NO: 63751 - DNA, 28 bp, Homo sapiens
  source 1..28: mol_type = genomic DNA
gcgatccgagttcaaatctcggtggaac

SEQ ID NO: 63752 - DNA, 41 bp, Homo sapiens; identical to SEQ ID NO: 16680
  source 1..41: mol_type = genomic DNA

SEQ ID NO: 63753 - DNA, 26 bp, Homo sapiens
  source 1..26: mol_type = genomic DNA
gcaggttcgagtcctgccgcggtcgc

SEQ ID NO: 63754 - DNA, 36 bp, Homo sapiens; identical to SEQ ID NO: 15942
  source 1..36: mol_type = genomic DNA

SEQ ID NO: 63755 - DNA, 33 bp, Homo sapiens; identical to SEQ ID NO: 36976
  source 1..33: mol_type = genomic DNA

SEQ ID NO: 63756 - DNA, 19 bp, Homo sapiens
  source 1..19: mol_type = genomic DNA
gagcctcacctggagcacc

SEQ ID NO: 63757 - DNA, 46 bp, Homo sapiens; identical to SEQ ID NO: 15458
  source 1..46: mol_type = genomic DNA

SEQ ID NO: 63758 - DNA, 34 bp, Homo sapiens; identical to SEQ ID NO: 36723
  source 1..34: mol_type = genomic DNA

SEQ ID NO: 63759 - DNA, 37 bp, Homo sapiens; identical to SEQ ID NO: 14763
  source 1..37: mol_type = genomic DNA

SEQ ID NO: 63760 - DNA, 33 bp, Homo sapiens; identical to SEQ ID NO: 47748
  source 1..33: mol_type = genomic DNA

SEQ ID NO: 63761 - DNA, 37 bp, Homo sapiens; identical to SEQ ID NO: 36634
  source 1..37: mol_type = genomic DNA

SEQ ID NO: 63762 - DNA, 46 bp, Homo sapiens; identical to SEQ ID NO: 14304
  source 1..46: mol_type = genomic DNA

SEQ ID NO: 63763 - DNA, 44 bp, Homo sapiens; identical to SEQ ID NO: 36502
  source 1..44: mol_type = genomic DNA

SEQ ID NO: 63764 - DNA, 43 bp, Homo sapiens; identical to SEQ ID NO: 36499
  source 1..43: mol_type = genomic DNA

SEQ ID NO: 63765 - DNA, 35 bp, Homo sapiens; identical to SEQ ID NO: 14222
  source 1..35: mol_type = genomic DNA

SEQ ID NO: 63766 - DNA, 36 bp, Homo sapiens; identical to SEQ ID NO: 36067
  source 1..36: mol_type = genomic DNA

SEQ ID NO: 63767 - DNA, 25 bp, Homo sapiens
  source 1..25: mol_type = genomic DNA
cgggttcgattcccggtcaggaaac

SEQ ID NO: 63768 - DNA, 31 bp, Homo sapiens; identical to SEQ ID NO: 12580
  source 1..31: mol_type = genomic DNA

SEQ ID NO: 63769 - DNA, 38 bp, Homo sapiens; identical to SEQ ID NO: 12444
  source 1..38: mol_type = genomic DNA

SEQ ID NO: 63770 - DNA, 29 bp, Homo sapiens
  source 1..29: mol_type = genomic DNA
cgcgggaggcccgggttcgattcccggcc

SEQ ID NO: 63771 - DNA, 22 bp, Homo sapiens
  source 1..22: mol_type = genomic DNA
cgcaatggtagcgcgtctgact

SEQ ID NO: 63772 - DNA, 19 bp, Homo sapiens
  source 1..19: mol_type = genomic DNA
cgattcccggccaacgcac

SEQ ID NO: 63773 - DNA, 35 bp, Homo sapiens
  source 1..35: mol_type = genomic DNA
cgaaaggttggtggttcgatcccacccagggacgc

SEQ ID NO: 63774 - DNA, 34 bp, Homo sapiens; identical to SEQ ID NO: 35413
  source 1..34: mol_type = genomic DNA

SEQ ID NO: 63775 - DNA, 17 bp, Homo sapiens
  source 1..17: mol_type = genomic DNA
cgaaaccgggcggaaac

SEQ ID NO: 63776 - DNA, 19 bp, Homo sapiens
  source 1..19: mol_type = genomic DNA
cgaaaccgggcagaagcac

SEQ ID NO: 63777 - DNA, 38 bp, Homo sapiens; identical to SEQ ID NO: 11172
  source 1..38: mol_type = genomic DNA

SEQ ID NO: 63778 - DNA, 36 bp, Homo sapiens; identical to SEQ ID NO: 10916
  source 1..36: mol_type = genomic DNA

SEQ ID NO: 63779 - DNA, 17 bp, Homo sapiens
  source 1..17: mol_type = genomic DNA
cccatatggtctagcgg

SEQ ID NO: 63780 - DNA, 29 bp, Homo sapiens
  source 1..29: mol_type = genomic DNA
cccaggcggcccgggttcgactcccggtg

SEQ ID NO: 63781 - DNA, 38 bp, Homo sapiens; identical to SEQ ID NO: 9967
  source 1..38: mol_type = genomic DNA

SEQ ID NO: 63782 - DNA, 23 bp, Homo sapiens
  source 1..23: mol_type = genomic DNA
cataatctgaaggtcctgagttc

SEQ ID NO: 63783 - DNA, 42 bp, Homo sapiens; identical to SEQ ID NO: 9260
  source 1..42: mol_type = genomic DNA

SEQ ID NO: 63784 - DNA, 35 bp, Homo sapiens; identical to SEQ ID NO: 9089
  source 1..35: mol_type = genomic DNA

SEQ ID NO: 63785 - DNA, 34 bp, Homo sapiens; identical to SEQ ID NO: 9088
  source 1..34: mol_type = genomic DNA

SEQ ID NO: 63786 - DNA, 47 bp, Homo sapiens; identical to SEQ ID NO: 8720
  source 1..47: mol_type = genomic DNA

SEQ ID NO: 63787 - DNA, 28 bp, Homo sapiens
  source 1..28: mol_type = genomic DNA
cagaggtcgatggatcgaaaccatcctc

SEQ ID NO: 63788 - DNA, 33 bp, Homo sapiens; identical to SEQ ID NO: 8581
  source 1..33: mol_type = genomic DNA

SEQ ID NO: 63789 - DNA, 35 bp, Homo sapiens; identical to SEQ ID NO: 33804
  source 1..35: mol_type = genomic DNA

SEQ ID NO: 63790 - DNA, 34 bp, Homo sapiens; identical to SEQ ID NO: 8012
  source 1..34: mol_type = genomic DNA

SEQ ID NO: 63791 - DNA, 35 bp, Homo sapiens; identical to SEQ ID NO: 8007
  source 1..35: mol_type = genomic DNA

SEQ ID NO: 63792 - DNA, 34 bp, Homo sapiens; identical to SEQ ID NO: 8006
  source 1..34: mol_type = genomic DNA

SEQ ID NO: 63793 - DNA, 37 bp, Homo sapiens; identical to SEQ ID NO: 6717
  source 1..37: mol_type = genomic DNA

SEQ ID NO: 63794 - DNA, 36 bp, Homo sapiens; identical to SEQ ID NO: 6716
  source 1..36: mol_type = genomic DNA

SEQ ID NO: 63795 - DNA, 37 bp, Homo sapiens; identical to SEQ ID NO: 6703
  source 1..37: mol_type = genomic DNA

SEQ ID NO: 63796 - DNA, 35 bp, Homo sapiens; identical to SEQ ID NO: 5548
  source 1..35: mol_type = genomic DNA

SEQ ID NO: 63797 - DNA, 31 bp, Homo sapiens; identical to SEQ ID NO: 32843
  source 1..31: mol_type = genomic DNA

SEQ ID NO: 63798 - DNA, 18 bp, Homo sapiens
  source 1..18: mol_type = genomic DNA
aggtcgtgagttcgagcc

SEQ ID NO: 63799 - DNA, 32 bp, Homo sapiens; identical to SEQ ID NO: 32760
  source 1..32: mol_type = genomic DNA

SEQ ID NO: 63800 - DNA, 30 bp, Homo sapiens; identical to SEQ ID NO: 5130
  source 1..30: mol_type = genomic DNA

SEQ ID NO: 63801 - DNA, 27 bp, Homo sapiens
  source 1..27: mol_type = genomic DNA
aggcggcccgggttcgactcccggtgt

SEQ ID NO: 63802 - DNA, 35 bp, Homo sapiens; identical to SEQ ID NO: 4530
  source 1..35: mol_type = genomic DNA

SEQ ID NO: 63803 - DNA, 19 bp, Homo sapiens
  source 1..19: mol_type = genomic DNA
agcatgggactcttcatcc

SEQ ID NO: 63804 - DNA, 16 bp, Homo sapiens
  source 1..16: mol_type = genomic DNA
actcccggtatgggaa

SEQ ID NO: 63805 - DNA, 25 bp, Homo sapiens
  source 1..25: mol_type = genomic DNA
acgggttcgaaccccgtccgtgcct

SEQ ID NO: 63806 - DNA, 35 bp, Homo sapiens; identical to SEQ ID NO: 2793
  source 1..35: mol_type = genomic DNA

SEQ ID NO: 63807 - DNA, 31 bp, Homo sapiens; identical to SEQ ID NO: 2705
  source 1..31: mol_type = genomic DNA

SEQ ID NO: 63808 - DNA, 33 bp, Homo sapiens; identical to SEQ ID NO: 1674
  source 1..33: mol_type = genomic DNA

SEQ ID NO: 63809 - DNA, 33 bp, Homo sapiens; identical to SEQ ID NO: 1664
  source 1..33: mol_type = genomic DNA

SEQ ID NO: 63810 - DNA, 30 bp, Homo sapiens; identical to SEQ ID NO: 1632
  source 1..30: mol_type = genomic DNA

SEQ ID NO: 63811 - DNA, 16 bp, Homo sapiens
  source 1..16: mol_type = genomic DNA
aaaccgggcagaagca

SEQ ID NO: 63812 - DNA, 29 bp, Homo sapiens
  source 1..29: mol_type = genomic DNA
aaaatgttggttatacccttcccgtacta

SEQ ID NO: 63813 - DNA, 16 bp, Homo sapiens
  source 1..16: mol_type = genomic DNA
tcgaatcccagcggtg

SEQ ID NO: 63814 - DNA, 32 bp, Homo sapiens; identical to SEQ ID NO: 24960
  source 1..32: mol_type = genomic DNA

SEQ ID NO: 63815 - DNA, 44 bp, Homo sapiens; identical to SEQ ID NO: 21494
  source 1..44: mol_type = genomic DNA

SEQ ID NO: 63816 - DNA, 35 bp, Homo sapiens; identical to SEQ ID NO: 18456
  source 1..35: mol_type = genomic DNA

SEQ ID NO: 63817 - DNA, 33 bp, Homo sapiens; identical to SEQ ID NO: 18241
  source 1..33: mol_type = genomic DNA

SEQ ID NO: 63818 - DNA, 32 bp, Homo sapiens; identical to SEQ ID NO: 14988
  source 1..32: mol_type = genomic DNA

SEQ ID NO: 63819 - DNA, 21 bp, Homo sapiens
  source 1..21: mol_type = genomic DNA
cgggttcgattcccgggcggc

SEQ ID NO: 63820 - DNA, 26 bp, Homo sapiens
  source 1..26: mol_type = genomic DNA
cgggagaccggggttcgattccccga

SEQ ID NO: 63821 - DNA, 33 bp, Homo sapiens; identical to SEQ ID NO: 12208
  source 1..33: mol_type = genomic DNA

SEQ ID NO: 63822 - DNA, 35 bp, Homo sapiens; identical to SEQ ID NO: 9709
  source 1..35: mol_type = genomic DNA

SEQ ID NO: 63823 - DNA, 22 bp, Homo sapiens
  source 1..22: mol_type = genomic DNA
cagcggaagcgtgctgggccca

SEQ ID NO: 63824 - DNA, 28 bp, Homo sapiens
  source 1..28: mol_type = genomic DNA
attgtgggttcgagtcccatctggggtg

SEQ ID NO: 63825 - DNA, 25 bp, Homo sapiens
  source 1..25: mol_type = genomic DNA
atgctttgcacgtatgaggccccgg

SEQ ID NO: 63826 - DNA, 24 bp, Homo sapiens
  source 1..24: mol_type = genomic DNA
atgaaaacctttttccaaggacac

SEQ ID NO: 63827 - DNA, 39 bp, Homo sapiens; identical to SEQ ID NO: 5552
  source 1..39: mol_type = genomic DNA

SEQ ID NO: 63828 - DNA, 36 bp, Homo sapiens; identical to SEQ ID NO: 3780
  source 1..36: mol_type = genomic DNA

SEQ ID NO: 63829 - DNA, 33 bp, Homo sapiens; identical to SEQ ID NO: 12208
  source 1..33: mol_type = genomic DNA

SEQ ID NO: 63830 - DNA, 34 bp, Homo sapiens; identical to SEQ ID NO: 9102
  source 1..34: mol_type = genomic DNA

SEQ ID NO: 63831 - DNA, 23 bp, Homo sapiens
  source 1..23: mol_type = genomic DNA
attcccattcttgcgacccgggt

SEQ ID NO: 63832 - DNA, 31 bp, Homo sapiens; identical to SEQ ID NO: 5228
  source 1..31: mol_type = genomic DNA

SEQ ID NO: 63833 - DNA, 34 bp, Homo sapiens; identical to SEQ ID NO: 5022
  source 1..34: mol_type = genomic DNA

SEQ ID NO: 63834 - DNA, 32 bp, Homo sapiens; identical to SEQ ID NO: 4484
  source 1..32: mol_type = genomic DNA

SEQ ID NO: 63835 - DNA, 32 bp, Homo sapiens; identical to SEQ ID NO: 3777
  source 1..32: mol_type = genomic DNA

SEQ ID NO: 63836 - DNA, 36 bp, Homo sapiens; identical to SEQ ID NO: 9965
  source 1..36: mol_type = genomic DNA

SEQ ID NO: 63837 - DNA, 38 bp, Homo sapiens; identical to SEQ ID NO: 7865
  source 1..38: mol_type = genomic DNA

SEQ ID NO: 63838 - DNA, 47 bp, Homo sapiens; identical to SEQ ID NO: 30476
  source 1..47: mol_type = genomic DNA

SEQ ID NO: 63839 - DNA, 46 bp, Homo sapiens; identical to SEQ ID NO: 30475
  source 1..46: mol_type = genomic DNA

SEQ ID NO: 63840 - DNA, 24 bp, Homo sapiens
  source 1..24: mol_type = genomic DNA
ttgattagggtgcttagctgttaa

SEQ ID NO: 63841 - DNA, 43 bp, Homo sapiens; identical to SEQ ID NO: 28347
  source 1..43: mol_type = genomic DNA

SEQ ID NO: 63842 - DNA, 34 bp, Homo sapiens; identical to SEQ ID NO: 26677
  source 1..34: mol_type = genomic DNA

SEQ ID NO: 63843 - DNA, 19 bp, Homo sapiens
  source 1..19: mol_type = genomic DNA
tcgaatcccagcggggcct

SEQ ID NO: 63844 - DNA, 43 bp, Homo sapiens; identical to SEQ ID NO: 21543
  source 1..43: mol_type = genomic DNA

SEQ ID NO: 63845 - DNA, 46 bp, Homo sapiens; identical to SEQ ID NO: 12319
  source 1..46: mol_type = genomic DNA

SEQ ID NO: 63846 - DNA, 17 bp, Homo sapiens
  source 1..17: mol_type = genomic DNA
cgagccccagtggaacc

SEQ ID NO: 63847 - DNA, 32 bp, Homo sapiens; identical to SEQ ID NO: 11629
  source 1..32: mol_type = genomic DNA

SEQ ID NO: 63848 - DNA, 27 bp, Homo sapiens
  source 1..27: mol_type = genomic DNA
cagaggcttacgaccccttatttaccc

SEQ ID NO: 63849 - DNA, 38 bp, Homo sapiens; identical to SEQ ID NO: 7865
  source 1..38: mol_type = genomic DNA

SEQ ID NO: 63850 - DNA, 30 bp, Homo sapiens; identical to SEQ ID NO: 1566
  source 1..30: mol_type = genomic DNA

SEQ ID NO: 63851 - DNA, 19 bp, Homo sapiens
  source 1..19: mol_type = genomic DNA
aaaaattttggtgcaactc

SEQ ID NO: 63852 - DNA, 20 bp, Homo sapiens
  source 1..20: mol_type = genomic DNA
aaaaattttggtgcaactcc

SEQ ID NO: 63853 - DNA, 21 bp, Homo sapiens
  source 1..21: mol_type = genomic DNA
aaaaattttggtgcaactcca

SEQ ID NO: 63854 - DNA, 24 bp, Homo sapiens
  source 1..24: mol_type = genomic DNA
aaaaattttggtgcaactccaaat

SEQ ID NO: 63855 - DNA, 25 bp, Homo sapiens
  source 1..25: mol_type = genomic DNA
aaaaattttggtgcaactccaaata

SEQ ID NO: 63856 - DNA, 16 bp, Homo sapiens
  source 1..16: mol_type = genomic DNA
aaaacatcagattgtg

SEQ ID NO: 63857 - DNA, 17 bp, Homo sapiens
  source 1..17: mol_type = genomic DNA
aaaacatcagattgtga

SEQ ID NO: 63858 - DNA, 18 bp, Homo sapiens
  source 1..18: mol_type = genomic DNA
aaaacatcagattgtgaa

SEQ ID NO: 63859 - DNA, 19 bp, Homo sapiens
  source 1..19: mol_type = genomic DNA
aaaacatcagattgtgaat

SEQ ID NO: 63860 - DNA, 20 bp, Homo sapiens
  source 1..20: mol_type = genomic DNA
aaaacatcagattgtgaatc

SEQ ID NO: 63861 - DNA, 21 bp, Homo sapiens
  source 1..21: mol_type = genomic DNA
aaaacatcagattgtgaatct

SEQ ID NO: 63862 - DNA, 23 bp, Homo sapiens
  source 1..23: mol_type = genomic DNA
aaaacatcagattgtgaatctga

SEQ ID NO: 63863 - DNA, 24 bp, Homo sapiens
  source 1..24: mol_type = genomic DNA
aaaacatcagattgtgaatctgac

SEQ ID NO: 63864 - DNA, 25 bp, Homo sapiens
  source 1..25: mol_type = genomic DNA
aaaacatcagattgtgaatctgaca

SEQ ID NO: 63865 - DNA, 22 bp, Homo sapiens
  source 1..22: mol_type = genomic DNA
aaaacctttttccaaggacacc

SEQ ID NO: 63866 - DNA, 23 bp, Homo sapiens
  source 1..23: mol_type = genomic DNA
aaaacctttttccaaggacacca

SEQ ID NO: 63867 - DNA, 16 bp, Homo sapiens
  source 1..16: mol_type = genomic DNA
aaaacgaatgatttcg

SEQ ID NO: 63868 - DNA, 19 bp, Homo sapiens
  source 1..19: mol_type = genomic DNA
aaaacgaatgatttcgact

SEQ ID NO: 63869 - DNA, 20 bp, Homo sapiens
  source 1..20: mol_type = genomic DNA
aaaacgaatgatttcgactc

SEQ ID NO: 63870 - DNA, 21 bp, Homo sapiens
  source 1..21: mol_type = genomic DNA
aaaacgaatgatttcgactca

SEQ ID NO: 63871 - DNA, 22 bp, Homo sapiens
  source 1..22: mol_type = genomic DNA
aaaacgaatgatttcgactcat

SEQ ID NO: 63872 - DNA, 21 bp, Homo sapiens
  source 1..21: mol_type = genomic DNA
aaaactttacagtcagaggtt

SEQ ID NO: 63873 - DNA, 16 bp, Homo sapiens
  source 1..16: mol_type = genomic DNA
aaaatgtttagacggg

SEQ ID NO: 63874 - DNA, 17 bp, Homo sapiens
  source 1..17: mol_type = genomic DNA
aaaatgtttagacgggc

SEQ ID NO: 63875 - DNA, 18 bp, Homo sapiens
  source 1..18: mol_type = genomic DNA
aaaatgtttagacgggct

SEQ ID NO: 63876 - DNA, 19 bp, Homo sapiens
  source 1..19: mol_type = genomic DNA
aaaatgtttagacgggctc

SEQ ID NO: 63877 - DNA, 20 bp, Homo sapiens
  source 1..20: mol_type = genomic DNA
aaaatgtttagacgggctca

SEQ ID NO: 63878 - DNA, 21 bp, Homo sapiens
  source 1..21: mol_type = genomic DNA
aaaatgtttagacgggctcac

SEQ ID NO: 63879 - DNA, 22 bp, Homo sapiens
  source 1..22: mol_type = genomic DNA
aaaatgtttagacgggctcaca

SEQ ID NO: 63880 - DNA, 23 bp, Homo sapiens
  source 1..23: mol_type = genomic DNA
aaaatgtttagacgggctcacat

SEQ ID NO: 63881 - DNA, 18 bp, Homo sapiens
  source 1..18: mol_type = genomic DNA
aaaattttggtgcaactc

SEQ ID NO: 63882 - DNA, 19 bp, Homo sapiens
  source 1..19: mol_type = genomic DNA
aaaattttggtgcaactcc

SEQ ID NO: 63883 - DNA, 20 bp, Homo sapiens
  source 1..20: mol_type = genomic DNA
aaaattttggtgcaactcca

SEQ ID NO: 63884 - DNA, 24 bp, Homo sapiens
  source 1..24: mol_type = genomic DNA
aaaattttggtgcaactccaaata

SEQ ID NO: 63885 - DNA, 20 bp, Homo sapiens
  source 1..20: mol_type = genomic DNA
aaacaaaacgaatgatttcg

SEQ ID NO: 63886 - DNA, 21 bp, Homo sapiens
  source 1..21: mol_type = genomic DNA
aaacaggagatcctgggttcg

SEQ ID NO: 63887 - DNA, 22 bp, Homo sapiens
  source 1..22: mol_type = genomic DNA
aaacaggagatcctgggttcga

SEQ ID NO: 63888 - DNA, 16 bp, Homo sapiens
  source 1..16: mol_type = genomic DNA
aaacatcagattgtga

SEQ ID NO: 63889 - DNA, 18 bp, Homo sapiens
  source 1..18: mol_type = genomic DNA
aaacatcagattgtgaat

SEQ ID NO: 63890 - DNA, 19 bp, Homo sapiens
  source 1..19: mol_type = genomic DNA
aaacatcagattgtgaatc

SEQ ID NO: 63891 - DNA, 20 bp, Homo sapiens
  source 1..20: mol_type = genomic DNA
aaacatcagattgtgaatct

SEQ ID NO: 63892 - DNA, 22 bp, Homo sapiens
  source 1..22: mol_type = genomic DNA
aaacatcagattgtgaatctga

SEQ ID NO: 63893 - DNA, 23 bp, Homo sapiens
  source 1..23: mol_type = genomic DNA
aaacatcagattgtgaatctgac

SEQ ID NO: 63894 - DNA, 24 bp, Homo sapiens
  source 1..24: mol_type = genomic DNA
aaacatcagattgtgaatctgaca

SEQ ID NO: 63895 - DNA, 19 bp, Homo sapiens
  source 1..19: mol_type = genomic DNA
aaaccatcctctgctacca

SEQ ID NO: 63896 - DNA, 20 bp, Homo sapiens
  source 1..20: mol_type = genomic DNA
aaaccatttcataactttgt

SEQ ID NO: 63897 - DNA, 18 bp, Homo sapiens
  source 1..18: mol_type = genomic DNA
aaacccccttatttctac

SEQ ID NO: 63898 - DNA, 19 bp, Homo sapiens
  source 1..19: mol_type = genomic DNA
aaacccccttatttctacc

SEQ ID NO: 63899 - DNA, 20 bp, Homo sapiens
  source 1..20: mol_type = genomic DNA
aaacccccttatttctacca

SEQ ID NO: 63900 - DNA, 17 bp, Homo sapiens
  source 1..17: mol_type = genomic DNA
aaaccggagatgaaaac

SEQ ID NO: 63901 - DNA, 18 bp, Homo sapiens
  source 1..18: mol_type = genomic DNA
aaaccggagatgaaaacc

SEQ ID NO: 63902 - DNA, 19 bp, Homo sapiens
  source 1..19: mol_type = genomic DNA
aaaccggagatgaaaacct

SEQ ID NO: 63903 - DNA, 18 bp, Homo sapiens
  source 1..18: mol_type = genomic DNA
aaaccgggcggaaacacc

SEQ ID NO: 63904 - DNA, 19 bp, Homo sapiens
  source 1..19: mol_type = genomic DNA
aaaccgggcggaaacacca

SEQ ID NO: 63905 - DNA, 16 bp, Homo sapiens
  source 1..16: mol_type = genomic DNA
aaacctgccggggctt

SEQ ID NO: 63906 - DNA, 17 bp, Homo sapiens
  source 1..17: mol_type = genomic DNA
aaacctgccggggcttc

SEQ ID NO: 63907 - DNA, 18 bp, Homo sapiens
  source 1..18: mol_type = genomic DNA
aaacctgccggggcttcc

SEQ ID NO: 63908 - DNA, 21 bp, Homo sapiens
  source 1..21: mol_type = genomic DNA
aaacctttttccaaggacacc

SEQ ID NO: 63909 - DNA, 22 bp, Homo sapiens
  source 1..22: mol_type = genomic DNA
aaacctttttccaaggacacca

SEQ ID NO: 63910 - DNA, 18 bp, Homo sapiens
  source 1..18: mol_type = genomic DNA
aaacgaatgatttcgact

SEQ ID NO: 63911 - DNA, 19 bp, Homo sapiens
  source 1..19: mol_type = genomic DNA
aaacgaatgatttcgactc

SEQ ID NO: 63912 - DNA, 20 bp, Homo sapiens
  source 1..20: mol_type = genomic DNA
aaacgaatgatttcgactca

SEQ ID NO: 63913 - DNA, 21 bp, Homo sapiens
  source 1..21: mol_type = genomic DNA
aaacgaatgatttcgactcat

SEQ ID NO: 63914 - DNA, 22 bp, Homo sapiens
  source 1..22: mol_type = genomic DNA
aaacgaatgatttcgactcatt

SEQ ID NO: 63915 - DNA, 19 bp, Homo sapiens
  source 1..19: mol_type = genomic DNA
aaagacaggggttaggcct

SEQ ID NO: 63916 - DNA, 20 bp, Homo sapiens
  source 1..20: mol_type = genomic DNA
aaagacaggggttaggcctc

SEQ ID NO: 63917 - DNA, 21 bp, Homo sapiens
  source 1..21: mol_type = genomic DNA
aaagacaggggttaggcctct

SEQ ID NO: 63918 - DNA, 22 bp, Homo sapiens
  source 1..22: mol_type = genomic DNA
aaagacaggggttaggcctctt

SEQ ID NO: 63919 - DNA, 23 bp, Homo sapiens
  source 1..23: mol_type = genomic DNA
aaagacaggggttaggcctcttt

SEQ ID NO: 63920 - DNA, 25 bp, Homo sapiens
  source 1..25: mol_type = genomic DNA
aaagacaggggttaggcctcttttt

SEQ ID NO: 63921 - DNA, 17 bp, Homo sapiens
  source 1..17: mol_type = genomic DNA
aaagactttttctctga

SEQ ID NO: 63922 - DNA, 18 bp, Homo sapiens
  source 1..18: mol_type = genomic DNA
aaagactttttctctgac

SEQ ID NO: 63923 - DNA, 19 bp, Homo sapiens
  source 1..19: mol_type = genomic DNA
aaagactttttctctgacc

SEQ ID NO: 63924 - DNA, 20 bp, Homo sapiens
  source 1..20: mol_type = genomic DNA
aaagactttttctctgacca

SEQ ID NO: 63925 - DNA, 16 bp, Homo sapiens
  source 1..16: mol_type = genomic DNA
aaagattaagagaacc

SEQ ID NO: 63926 - DNA, 17 bp, Homo sapiens
  source 1..17: mol_type = genomic DNA
aaagattaagagaacca

SEQ ID NO: 63927 - DNA, 18 bp, Homo sapiens
  source 1..18: mol_type = genomic DNA
aaagattaagagaaccaa

SEQ ID NO: 63928 - DNA, 19 bp, Homo sapiens
  source 1..19: mol_type = genomic DNA
aaagattaagagaaccaac

SEQ ID NO: 63929 - DNA, 20 bp, Homo sapiens
  source 1..20: mol_type = genomic DNA
aaagattaagagaaccaaca

SEQ ID NO: 63930 - DNA, 21 bp, Homo sapiens
  source 1..21: mol_type = genomic DNA
aaagattaagagaaccaacac

SEQ ID NO: 63931 - DNA, 22 bp, Homo sapiens
  source 1..22: mol_type = genomic DNA
aaagattaagagaaccaacacc

SEQ ID NO: 63932 - DNA, 16 bp, Homo sapiens
  source 1..16: mol_type = genomic DNA
aaagcaatacactgaa

SEQ ID NO: 63933 - DNA, 16 bp, Homo sapiens
  source 1..16: mol_type = genomic DNA
aaagcacccaacttac

SEQ ID NO: 63934 - DNA, 17 bp, Homo sapiens
  source 1..17: mol_type = genomic DNA
aaagcacccaacttaca

SEQ ID NO: 63935 - DNA, 18 bp, Homo sapiens
  source 1..18: mol_type = genomic DNA
aaagcacccaacttacac

SEQ ID NO: 63936 - DNA, 20 bp, Homo sapiens
  source 1..20: mol_type = genomic DNA
aaagcacccaacttacactt

SEQ ID NO: 63937 - DNA, 18 bp, Homo sapiens
  source 1..18: mol_type = genomic DNA
aaagctcacaagaactgc

SEQ ID NO: 63938 - DNA, 19 bp, Homo sapiens
  source 1..19: mol_type = genomic DNA
aaagctcacaagaactgct

SEQ ID NO: 63939 - DNA, 20 bp, Homo sapiens
  source 1..20: mol_type = genomic DNA
aaagctcacaagaactgcta

SEQ ID NO: 63940 - DNA, 21 bp, Homo sapiens
  source 1..21: mol_type = genomic DNA
aaagctcacaagaactgctaa

SEQ ID NO: 63941 - DNA, 22 bp, Homo sapiens
  source 1..22: mol_type = genomic DNA
aaagctcacaagaactgctaac

SEQ ID NO: 63942 - DNA, 16 bp, Homo sapiens
  source 1..16: mol_type = genomic DNA
aaagtggctgatttgc

SEQ ID NO: 63943 - DNA, 16 bp, Homo sapiens
  source 1..16: mol_type = genomic DNA
aaagttaaattatagg

SEQ ID NO: 63944 - DNA, 16 bp, Homo sapiens
  source 1..16: mol_type = genomic DNA
aaataagctatcgggc

SEQ ID NO: 63945 - DNA, 18 bp, Homo sapiens
  source 1..18: mol_type = genomic DNA
aaataagctatcgggccc

SEQ ID NO: 63946 - DNA, 19 bp, Homo sapiens
  source 1..19: mol_type = genomic DNA
aaataagctatcgggccca

SEQ ID NO: 63947 - DNA, 17 bp, Homo sapiens
  source 1..17: mol_type = genomic DNA
aaataataggagcttaa

SEQ ID NO: 63948 - DNA, 19 bp, Homo sapiens
  source 1..19: mol_type = genomic DNA
aaataataggagcttaaac

SEQ ID NO: 63949 - DNA, 20 bp, Homo sapiens
  source 1..20: mol_type = genomic DNA
aaataataggagcttaaacc

SEQ ID NO: 63950 - DNA, 21 bp, Homo sapiens
  source 1..21: mol_type = genomic DNA
aaataataggagcttaaaccc

SEQ ID NO: 63951 - DNA, 20 bp, Homo sapiens
  source 1..20: mol_type = genomic DNA
aaatacaacgatggtttttc

SEQ ID NO: 63952 - DNA, 17 bp, Homo sapiens
  source 1..17: mol_type = genomic DNA
aaatacagaccaagagc

SEQ ID NO: 63953 - DNA, 18 bp, Homo sapiens
  source 1..18: mol_type = genomic DNA
aaatacagaccaagagcc

SEQ ID NO: 63954 - DNA, 21 bp, Homo sapiens
  source 1..21: mol_type = genomic DNA
aaatacagaccaagagccttc

SEQ ID NO: 63955 - DNA, 22 bp, Homo sapiens
  source 1..22: mol_type = genomic DNA
aaatacagaccaagagccttca

SEQ ID NO: 63956 - DNA, 20 bp, Homo sapiens
  source 1..20: mol_type = genomic DNA
aaatagtaccgttaacttcc

SEQ ID NO: 63957 - DNA, 18 bp, Homo sapiens
  source 1..18: mol_type = genomic DNA
aaatcccggacgagcccc

SEQ ID NO: 63958 - DNA, 19 bp, Homo sapiens
  source 1..19: mol_type = genomic DNA
aaatcccggacgagccccc

SEQ ID NO: 63959 - DNA, 20 bp, Homo sapiens
  source 1..20: mol_type = genomic DNA
aaatcctatatatcttacca

SEQ ID NO: 63960 - DNA, 19 bp, Homo sapiens
  source 1..19: mol_type = genomic DNA
aaatctcggtggaacctcc

SEQ ID NO: 63961 - DNA, 20 bp, Homo sapiens
  source 1..20: mol_type = genomic DNA
aaatctcggtggaacctcca

SEQ ID NO: 63962 - DNA, 16 bp, Homo sapiens
  source 1..16: mol_type = genomic DNA
aaatgtttagacgggc

SEQ ID NO: 63963 - DNA, 17 bp, Homo sapiens
  source 1..17: mol_type = genomic DNA
aaatgtttagacgggct

SEQ ID NO: 63964 - DNA, 18 bp, Homo sapiens
  source 1..18: mol_type = genomic DNA
aaatgtttagacgggctc

SEQ ID NO: 63965 - DNA, 19 bp, Homo sapiens
  source 1..19: mol_type = genomic DNA
aaatgtttagacgggctca

SEQ ID NO: 63966 - DNA, 20 bp, Homo sapiens
  source 1..20: mol_type = genomic DNA
aaatgtttagacgggctcac

SEQ ID NO: 63967 - DNA, 21 bp, Homo sapiens
  source 1..21: mol_type = genomic DNA
aaatgtttagacgggctcaca

SEQ ID NO: 63968 - DNA, 22 bp, Homo sapiens
  source 1..22: mol_type = genomic DNA
aaatgtttagacgggctcacat

SEQ ID NO: 63969 - DNA, 22 bp, Homo sapiens
  source 1..22: mol_type = genomic DNA
aaattataggctaaatcctata

SEQ ID NO: 63970 - DNA, 24 bp, Homo sapiens
  source 1..24: mol_type = genomic DNA
aaattataggctaaatcctatata

SEQ ID NO: 63971 - DNA, 23 bp, Homo sapiens
  source 1..23: mol_type = genomic DNA
aaattttggtgcaactccaaata

SEQ ID NO: 63972 - DNA, 19 bp, Homo sapiens
  source 1..19: mol_type = genomic DNA
aacaaaacgaatgatttcg

SEQ ID NO: 63973 - DNA, 18 bp, Homo sapiens
  source 1..18: mol_type = genomic DNA
aacaacatggctttctca

SEQ ID NO: 63974 - DNA, 20 bp, Homo sapiens
  source 1..20: mol_type = genomic DNA
aacaacatggctttctcacc

SEQ ID NO: 63975 - DNA, 21 bp, Homo sapiens
  source 1..21: mol_type = genomic DNA
aacaacatggctttctcacca

SEQ ID NO: 63976 - DNA, 18 bp, Homo sapiens
  source 1..18: mol_type = genomic DNA
aacacaaagcacccaact

SEQ ID NO: 63977 - DNA, 18 bp, Homo sapiens
  source 1..18: mol_type = genomic DNA
aacacctctttacagtga

SEQ ID NO: 63978 - DNA, 19 bp, Homo sapiens
  source 1..19: mol_type = genomic DNA
aacacctctttacagtgac

SEQ ID NO: 63979 - DNA, 20 bp, Homo sapiens
  source 1..20: mol_type = genomic DNA
aacacctctttacagtgacc

SEQ ID NO: 63980 - DNA, 21 bp, Homo sapiens
  source 1..21: mol_type = genomic DNA
aacacctctttacagtgacca

SEQ ID NO: 63981 - DNA, 18 bp, Homo sapiens
  source 1..18: mol_type = genomic DNA
aacagctatccattggtc

SEQ ID NO: 63982 - DNA, 19 bp, Homo sapiens
  source 1..19: mol_type = genomic DNA
aacagctatccattggtct

SEQ ID NO: 63983 - DNA, 19 bp, Homo sapiens
  source 1..19: mol_type = genomic DNA
aacaggagatcctgggttc

SEQ ID NO: 63984 - DNA, 20 bp, Homo sapiens
  source 1..20: mol_type = genomic DNA
aacaggagatcctgggttcg

SEQ ID NO: 63985 - DNA, 21 bp, Homo sapiens
  source 1..21: mol_type = genomic DNA
aacaggagatcctgggttcga

SEQ ID NO: 63986 - DNA, 17 bp, Homo sapiens
  source 1..17: mol_type = genomic DNA
aacatcagattgtgaat

SEQ ID NO: 63987 - DNA, 18 bp, Homo sapiens
  source 1..18: mol_type = genomic DNA
aacatcagattgtgaatc

SEQ ID NO: 63988 - DNA, 19 bp, Homo sapiens
  source 1..19: mol_type = genomic DNA
aacatcagattgtgaatct

SEQ ID NO: 63989 - DNA, 20 bp, Homo sapiens
  source 1..20: mol_type = genomic DNA
aacatcagattgtgaatctg

SEQ ID NO: 63990 - DNA, 21 bp, Homo sapiens
  source 1..21: mol_type = genomic DNA
aacatcagattgtgaatctga

SEQ ID NO: 63991 - DNA, 22 bp, Homo sapiens
  source 1..22: mol_type = genomic DNA
aacatcagattgtgaatctgac

SEQ ID NO: 63992 - DNA, 23 bp, Homo sapiens
  source 1..23: mol_type = genomic DNA
aacatcagattgtgaatctgaca

SEQ ID NO: 63993 - DNA, 17 bp, Homo sapiens
  source 1..17: mol_type = genomic DNA
aacatggctttctcacc

SEQ ID NO: 63994 - DNA, 18 bp, Homo sapiens
  source 1..18: mol_type = genomic DNA
aacatggctttctcacca

SEQ ID NO: 63995 - DNA, 21 bp, Homo sapiens
  source 1..21: mol_type = genomic DNA
aacattcaaaaaagagtacca

SEQ ID NO: 63996 - DNA, 19 bp, Homo sapiens
  source 1..19: mol_type = genomic DNA
aaccaaaacatcagattgt

SEQ ID NO: 63997 - DNA, 20 bp, Homo sapiens
  source 1..20: mol_type = genomic DNA
aaccaaaacatcagattgtg

SEQ ID NO: 63998 - DNA, 18 bp, Homo sapiens
  source 1..18: mol_type = genomic DNA
aaccaggcggaaacacca

SEQ ID NO: 63999 - DNA, 17 bp, Homo sapiens
  source 1..17: mol_type = genomic DNA
aaccatcctctgctacc

SEQ ID NO: 64000 - DNA, 18 bp, Homo sapiens
  source 1..18: mol_type = genomic DNA
aaccatcctctgctacca

SEQ ID NO: 64001 - DNA, 18 bp, Homo sapiens
  source 1..18: mol_type = genomic DNA
aacccagaggtcgatgga

SEQ ID NO: 64002 - DNA, 21 bp, Homo sapiens
  source 1..21: mol_type = genomic DNA
aacccagaggtcgatggatcg

SEQ ID NO: 64003 - DNA, 19 bp, Homo sapiens
  source 1..19: mol_type = genomic DNA
aaccccactcctggtacca

SEQ ID NO: 64004 - DNA, 17 bp, Homo sapiens
  source 1..17: mol_type = genomic DNA
aacccccttatttctac

SEQ ID NO: 64005 - DNA, 18 bp, Homo sapiens
  source 1..18: mol_type = genomic DNA
aacccccttatttctacc

SEQ ID NO: 64006 - DNA, 19 bp, Homo sapiens
  source 1..19: mol_type = genomic DNA
aacccccttatttctacca

SEQ ID NO: 64007 - DNA, 20 bp, Homo sapiens
  source 1..20: mol_type = genomic DNA
aaccgaagatcacgggttcg

SEQ ID NO: 64008 - DNA, 21 bp, Homo sapiens
  source 1..21: mol_type = genomic DNA
aaccgaagatcacgggttcga

SEQ ID NO: 64009 - DNA, 23 bp, Homo sapiens
  source 1..23: mol_type = genomic DNA
aaccgaagatcacgggttcgaac

SEQ ID NO: 64010 - DNA, 21 bp, Homo sapiens
  source 1..21: mol_type = genomic DNA
aaccgaagatcgcgggttcga

SEQ ID NO: 64011 - DNA, 18 bp, Homo sapiens
  source 1..18: mol_type = genomic DNA
aaccgagcggaaacacca

SEQ ID NO: 64012 - DNA, 16 bp, Homo sapiens
  source 1..16: mol_type = genomic DNA
aaccggagatgaaaac

SEQ ID NO: 64013 - DNA, 17 bp, Homo sapiens
  source 1..17: mol_type = genomic DNA
aaccggagatgaaaacc

SEQ ID NO: 64014 - DNA, 18 bp, Homo sapiens
  source 1..18: mol_type = genomic DNA
aaccggagatgaaaacct

SEQ ID NO: 64015 - DNA, 19 bp, Homo sapiens
  source 1..19: mol_type = genomic DNA
aaccggagatgaaaacctt

SEQ ID NO: 64016 - DNA, 20 bp, Homo sapiens
  source 1..20: mol_type = genomic DNA
aaccggagatgaaaaccttt

SEQ ID NO: 64017 - DNA, 21 bp, Homo sapiens
  source 1..21: mol_type = genomic DNA
aaccggagatgaaaacctttt

SEQ ID NO: 64018 - DNA, 18 bp, Homo sapiens
  source 1..18: mol_type = genomic DNA
aaccgggcagaagcacca

SEQ ID NO: 64019 - DNA, 16 bp, Homo sapiens
  source 1..16: mol_type = genomic DNA
aaccgggcggaaacac

SEQ ID NO: 64020 - DNA, 17 bp, Homo sapiens
  source 1..17: mol_type = genomic DNA
aaccgggcggaaacacc

SEQ ID NO: 64021 - DNA, 18 bp, Homo sapiens
  source 1..18: mol_type = genomic DNA
aaccgggcggaaacacca

SEQ ID NO: 64022 - DNA, 16 bp, Homo sapiens
  source 1..16: mol_type = genomic DNA
aacctgccggggcttc

SEQ ID NO: 64023 - DNA, 17 bp, Homo sapiens
  source 1..17: mol_type = genomic DNA
aacctgccggggcttcc

SEQ ID NO: 64024 - DNA, 20 bp, Homo sapiens
  source 1..20: mol_type = genomic DNA
aacctttttccaaggacacc

SEQ ID NO: 64025 - DNA, 21 bp, Homo sapiens
  source 1..21: mol_type = genomic DNA
aacctttttccaaggacacca

SEQ ID NO: 64026 - DNA, 18 bp, Homo sapiens
  source 1..18: mol_type = genomic DNA
aacgaatgatttcgactc

SEQ ID NO: 64027 - DNA, 19 bp, Homo sapiens
  source 1..19: mol_type = genomic DNA
aacgaatgatttcgactca

SEQ ID NO: 64028 - DNA, 20 bp, Homo sapiens
  source 1..20: mol_type = genomic DNA
aacgaatgatttcgactcat

SEQ ID NO: 64029 - DNA, 21 bp, Homo sapiens
  source 1..21: mol_type = genomic DNA
aacgaatgatttcgactcatt

SEQ ID NO: 64030 - DNA, 19 bp, Homo sapiens
  source 1..19: mol_type = genomic DNA
aacgatggtttttcatatc

SEQ ID NO: 64031 - DNA, 20 bp, Homo sapiens
  source 1..20: mol_type = genomic DNA
aacgatggtttttcatatca

SEQ ID NO: 64032 - DNA, 18 bp, Homo sapiens
  source 1..18: mol_type = genomic DNA
aactaagtgtttgtgggt

SEQ ID NO: 64033 - DNA, 19 bp, Homo sapiens
  source 1..19: mol_type = genomic DNA
aactaagtgtttgtgggtt

SEQ ID NO: 64034 - DNA, 20 bp, Homo sapiens
  source 1..20: mol_type = genomic DNA
aactaagtgtttgtgggttt

SEQ ID NO: 64035 - DNA, 16 bp, Homo sapiens
  source 1..16: mol_type = genomic DNA
aactagttttgacaac

SEQ ID NO: 64036 - DNA, 19 bp, Homo sapiens
  source 1..19: mol_type = genomic DNA
aactcatgcccccatgtct

SEQ ID NO: 64037 - DNA, 19 bp, Homo sapiens
  source 1..19: mol_type = genomic DNA
aactccaaataaaagtacc

SEQ ID NO: 64038 - DNA, 20 bp, Homo sapiens
  source 1..20: mol_type = genomic DNA
aactccaaataaaagtacca

SEQ ID NO: 64039 - DNA, 17 bp, Homo sapiens
  source 1..17: mol_type = genomic DNA
aactgctaactcatgcc

SEQ ID NO: 64040 - DNA, 17 bp, Homo sapiens
  source 1..17: mol_type = genomic DNA
aacttaacttgaccgct

SEQ ID NO: 64041 - DNA, 18 bp, Homo sapiens
  source 1..18: mol_type = genomic DNA
aacttaacttgaccgctc

SEQ ID NO: 64042 - DNA, 19 bp, Homo sapiens
  source 1..19: mol_type = genomic DNA
aacttaacttgaccgctct

SEQ ID NO: 64043 - DNA, 20 bp, Homo sapiens
  source 1..20: mol_type = genomic DNA
aacttaacttgaccgctctg

SEQ ID NO: 64044 - DNA, 21 bp, Homo sapiens
  source 1..21: mol_type = genomic DNA
aacttaacttgaccgctctga

SEQ ID NO: 64045 - DNA, 22 bp, Homo sapiens
  source 1..22: mol_type = genomic DNA
aacttaacttgaccgctctgac

SEQ ID NO: 64046 - DNA, 23 bp, Homo sapiens
  source 1..23: mol_type = genomic DNA
aacttaacttgaccgctctgacc

SEQ ID NO: 64047 - DNA, 24 bp, Homo sapiens
  source 1..24: mol_type = genomic DNA
aacttaacttgaccgctctgacca

SEQ ID NO: 64048 - DNA, 16 bp, Homo sapiens
  source 1..16: mol_type = genomic DNA
aacttacacttaggag

SEQ ID NO: 64049 - DNA, 17 bp, Homo sapiens
  source 1..17: mol_type = genomic DNA
aacttacacttaggaga

SEQ ID NO: 64050 - DNA, 18 bp, Homo sapiens
  source 1..18: mol_type = genomic DNA
aacttacacttaggagat

SEQ ID NO: 64051 - DNA, 19 bp, Homo sapiens
  source 1..19: mol_type = genomic DNA
aacttacacttaggagatt

SEQ ID NO: 64052 - DNA, 20 bp, Homo sapiens
  source 1..20: mol_type = genomic DNA
aacttacacttaggagattt

SEQ ID NO: 64053 - DNA, 21 bp, Homo sapiens
  source 1..21: mol_type = genomic DNA
aacttacacttaggagatttc

SEQ ID NO: 64054 - DNA, 22 bp, Homo sapiens
  source 1..22: mol_type = genomic DNA
aacttacacttaggagatttca

SEQ ID NO: 64055 - DNA, 24 bp, Homo sapiens
  source 1..24: mol_type = genomic DNA
aacttacacttaggagatttcaac

SEQ ID NO: 64056 - DNA, 18 bp, Homo sapiens
  source 1..18: mol_type = genomic DNA
aacttagcattaaccttt

SEQ ID NO: 64057 - DNA, 19 bp, Homo sapiens
  source 1..19: mol_type = genomic DNA
aacttagcattaacctttt

SEQ ID NO: 64058 - DNA, 16 bp, Homo sapiens
  source 1..16: mol_type = genomic DNA
aacttgaccgctctga

SEQ ID NO: 64059 - DNA, 17 bp, Homo sapiens
  source 1..17: mol_type = genomic DNA
aacttgaccgctctgac

SEQ ID NO: 64060 - DNA, 18 bp, Homo sapiens
  source 1..18: mol_type = genomic DNA
aacttgaccgctctgacc

SEQ ID NO: 64061 - DNA, 19 bp, Homo sapiens
  source 1..19: mol_type = genomic DNA
aacttgaccgctctgacca

SEQ ID NO: 64062 - DNA, 19 bp, Homo sapiens
  source 1..19: mol_type = genomic DNA
aactttacagtcagaggtt

SEQ ID NO: 64063 - DNA, 16 bp, Homo sapiens
  source 1..16: mol_type = genomic DNA
aagaactgctaactca

SEQ ID NO: 64064 - DNA, 18 bp, Homo sapiens
  source 1..18: mol_type = genomic DNA
aagaactgctaactcatg

SEQ ID NO: 64065 - DNA, 19 bp, Homo sapiens
  source 1..19: mol_type = genomic DNA
aagaactgctaactcatgc

SEQ ID NO: 64066 - DNA, 20 bp, Homo sapiens
  source 1..20: mol_type = genomic DNA
aagaactgctaactcatgcc

SEQ ID NO: 64067 - DNA, 23 bp, Homo sapiens
  source 1..23: mol_type = genomic DNA
aagaactgctaactcatgccccc

SEQ ID NO: 64068 - DNA, 22 bp, Homo sapiens
  source 1..22: mol_type = genomic DNA
aagaagcagcttcaaacctgcc

SEQ ID NO: 64069 - DNA, 19 bp, Homo sapiens
  source 1..19: mol_type = genomic DNA
aagacaggggttaggcctc

SEQ ID NO: 64070 - DNA, 22 bp, Homo sapiens
  source 1..22: mol_type = genomic DNA
aagacaggggttaggcctcttt

SEQ ID NO: 64071 - DNA, 16 bp, Homo sapiens
  source 1..16: mol_type = genomic DNA
aagactttttctctga

SEQ ID NO: 64072 - DNA, 17 bp, Homo sapiens
  source 1..17: mol_type = genomic DNA
aagactttttctctgac

SEQ ID NO: 64073 - DNA, 18 bp, Homo sapiens
  source 1..18: mol_type = genomic DNA
aagactttttctctgacc

SEQ ID NO: 64074 - DNA, 19 bp, Homo sapiens
  source 1..19: mol_type = genomic DNA
aagactttttctctgacca

SEQ ID NO: 64075 - DNA, 21 bp, Homo sapiens
  source 1..21: mol_type = genomic DNA
aagagaaccaacacctcttta

SEQ ID NO: 64076 - DNA, 16 bp, Homo sapiens
  source 1..16: mol_type = genomic DNA
aagaggtccccggttc

SEQ ID NO: 64077 - DNA, 17 bp, Homo sapiens
  source 1..17: mol_type = genomic DNA
aagaggtccccggttca

SEQ ID NO: 64078 - DNA, 16 bp, Homo sapiens
  source 1..16: mol_type = genomic DNA
aagattaagagaacca

SEQ ID NO: 64079 - DNA, 17 bp, Homo sapiens
  source 1..17: mol_type = genomic DNA
aagattaagagaaccaa

SEQ ID NO: 64080 - DNA, 18 bp, Homo sapiens
  source 1..18: mol_type = genomic DNA
aagattaagagaaccaac

SEQ ID NO: 64081 - DNA, 19 bp, Homo sapiens
  source 1..19: mol_type = genomic DNA
aagattaagagaaccaaca

SEQ ID NO: 64082 - DNA, 20 bp, Homo sapiens
  source 1..20: mol_type = genomic DNA
aagattaagagaaccaacac

SEQ ID NO: 64083 - DNA, 21 bp, Homo sapiens
  source 1..21: mol_type = genomic DNA
aagattaagagaaccaacacc

SEQ ID NO: 64084 - DNA, 22 bp, Homo sapiens
  source 1..22: mol_type = genomic DNA
aagattgagggttcgagtccct

SEQ ID NO: 64085 - DNA, 24 bp, Homo sapiens
  source 1..24: mol_type = genomic DNA
aagattgagggttcgagtcccttc

SEQ ID NO: 64086 - DNA, 24 bp, Homo sapiens
  source 1..24: mol_type = genomic DNA
aagattgcaggttcgagtcctgcc

SEQ ID NO: 64087 - DNA, 16 bp, Homo sapiens
  source 1..16: mol_type = genomic DNA
aagcacccaacttaca

SEQ ID NO: 64088 - DNA, 20 bp, Homo sapiens
  source 1..20: mol_type = genomic DNA
aagcacccaacttacactta

SEQ ID NO: 64089 - DNA, 18 bp, Homo sapiens
  source 1..18: mol_type = genomic DNA
aagcagcttcaaacctgc

SEQ ID NO: 64090 - DNA, 17 bp, Homo sapiens
  source 1..17: mol_type = genomic DNA
aagcagttgacccgggt

SEQ ID NO: 64091 - DNA, 16 bp, Homo sapiens
  source 1..16: mol_type = genomic DNA
aagccagggattgtgg

SEQ ID NO: 64092 - DNA, 18 bp, Homo sapiens
  source 1..18: mol_type = genomic DNA
aagccagggattgtgggt

SEQ ID NO: 64093 - DNA, 19 bp, Homo sapiens
  source 1..19: mol_type = genomic DNA
aagccagggattgtgggtt

SEQ ID NO: 64094 - DNA, 20 bp, Homo sapiens
  source 1..20: mol_type = genomic DNA
aagccagggattgtgggttc

SEQ ID NO: 64095 - DNA, 16 bp, Homo sapiens
  source 1..16: mol_type = genomic DNA
aagctatcgggcccat

SEQ ID NO: 64096 - DNA, 17 bp, Homo sapiens
  source 1..17: mol_type = genomic DNA
aagctatcgggcccata

SEQ ID NO: 64097 - DNA, 18 bp, Homo sapiens
  source 1..18: mol_type = genomic DNA
aagctatcgggcccatac

SEQ ID NO: 64098 - DNA, 19 bp, Homo sapiens
  source 1..19: mol_type = genomic DNA
aagctatcgggcccatacc

SEQ ID NO: 64099 - DNA, 23 bp, Homo sapiens
  source 1..23: mol_type = genomic DNA
aagctatcgggcccataccccga

SEQ ID NO: 64100 - DNA, 24 bp, Homo sapiens
  source 1..24: mol_type = genomic DNA
aagctatcgggcccataccccgaa

SEQ ID NO: 64101 - DNA, 17 bp, Homo sapiens
  source 1..17: mol_type = genomic DNA
aagctcacaagaactgc

SEQ ID NO: 64102 - DNA, 18 bp, Homo sapiens
  source 1..18: mol_type = genomic DNA
aagctcacaagaactgct

SEQ ID NO: 64103 - DNA, 19 bp, Homo sapiens
  source 1..19: mol_type = genomic DNA
aagctcacaagaactgcta

SEQ ID NO: 64104 - DNA, 20 bp, Homo sapiens
  source 1..20: mol_type = genomic DNA
aagctcacaagaactgctaa

SEQ ID NO: 64105 - DNA, 21 bp, Homo sapiens
  source 1..21: mol_type = genomic DNA
aagctcacaagaactgctaac

SEQ ID NO: 64106 - DNA, 22 bp, Homo sapiens
  source 1..22: mol_type = genomic DNA
aagctcacaagaactgctaact

SEQ ID NO: 64107 - DNA, 16 bp, Homo sapiens
  source 1..16: mol_type = genomic DNA
aagggcttagcttaat

SEQ ID NO: 64108 - DNA, 17 bp, Homo sapiens
  source 1..17: mol_type = genomic DNA
aagggcttagcttaatt

SEQ ID NO: 64109 - DNA, 18 bp, Homo sapiens
  source 1..18: mol_type = genomic DNA
aagggcttagcttaatta

SEQ ID NO: 64110 - DNA, 16 bp, Homo sapiens
  source 1..16: mol_type = genomic DNA
aaggtattagaaaaac

SEQ ID NO: 64111 - DNA, 17 bp, Homo sapiens
  source 1..17: mol_type = genomic DNA
aaggtattagaaaaacc

SEQ ID NO: 64112 - DNA, 17 bp, Homo sapiens
  source 1..17: mol_type = genomic DNA
aaggtcagctaaataag

SEQ ID NO: 64113 - DNA, 18 bp, Homo sapiens
  source 1..18: mol_type = genomic DNA
aaggtcagctaaataagc

SEQ ID NO: 64114 - DNA, 24 bp, Homo sapiens
  source 1..24: mol_type = genomic DNA
aaggttccgggttcgagtcccggc

SEQ ID NO: 64115 - DNA, 19 bp, Homo sapiens
  source 1..19: mol_type = genomic DNA
aagtcccattggtctagcc

SEQ ID NO: 64116 - DNA, 19 bp, Homo sapiens
  source 1..19: mol_type = genomic DNA
aagtggctgatttgcgttc

SEQ ID NO: 64117 - DNA, 18 bp, Homo sapiens
  source 1..18: mol_type = genomic DNA
aagttaaagattaagaga

SEQ ID NO: 64118 - DNA, 20 bp, Homo sapiens
  source 1..20: mol_type = genomic DNA
aagttaaagattaagagaac

SEQ ID NO: 64119 - DNA, 21 bp, Homo sapiens
  source 1..21: mol_type = genomic DNA
aagttaaagattaagagaacc

SEQ ID NO: 64120 - DNA, 19 bp, Homo sapiens
  source 1..19: mol_type = genomic DNA
aagttaaattataggctaa

SEQ ID NO: 64121 - DNA, 23 bp, Homo sapiens
  source 1..23: mol_type = genomic DNA
aagttgcaatacttaatttctgc

SEQ ID NO: 64122 - DNA, 24 bp, Homo sapiens
  source 1..24: mol_type = genomic DNA
aagttgcaatacttaatttctgcc

SEQ ID NO: 64123 - DNA, 25 bp, Homo sapiens
  source 1..25: mol_type = genomic DNA
aagttgcaatacttaatttctgcca

SEQ ID NO: 64124 - DNA, 17 bp, Homo sapiens
  source 1..17: mol_type = genomic DNA
aataagctatcgggccc

SEQ ID NO: 64125 - DNA, 18 bp, Homo sapiens
  source 1..18: mol_type = genomic DNA
aataagctatcgggccca

SEQ ID NO: 64126 - DNA, 19 bp, Homo sapiens
  source 1..19: mol_type = genomic DNA
aataagctatcgggcccat

SEQ ID NO: 64127 - DNA, 16 bp, Homo sapiens
  source 1..16: mol_type = genomic DNA
aataataggagcttaa

SEQ ID NO: 64128 - DNA, 18 bp, Homo sapiens
  source 1..18: mol_type = genomic DNA
aataataggagcttaaac

SEQ ID NO: 64129 - DNA, 19 bp, Homo sapiens
  source 1..19: mol_type = genomic DNA
aataataggagcttaaacc

SEQ ID NO: 64130 - DNA, 20 bp, Homo sapiens
  source 1..20: mol_type = genomic DNA
aataataggagcttaaaccc

SEQ ID NO: 64131 - DNA, 21 bp, Homo sapiens
  source 1..21: mol_type = genomic DNA
aataataggagcttaaacccc

SEQ ID NO: 64132 - DNA, 22 bp, Homo sapiens
  source 1..22: mol_type = genomic DNA
aataataggagcttaaaccccc

SEQ ID NO: 64133 - DNA, 19 bp, Homo sapiens
  source 1..19: mol_type = genomic DNA
aatacaacgatggtttttc

SEQ ID NO: 64134 - DNA, 20 bp, Homo sapiens
  source 1..20: mol_type = genomic DNA
aatacaacgatggtttttca

SEQ ID NO: 64135 - DNA, 16 bp, Homo sapiens
  source 1..16: mol_type = genomic DNA
aatacagaccaagagc

SEQ ID NO: 64136 - DNA, 20 bp, Homo sapiens
  source 1..20: mol_type = genomic DNA
aatacagaccaagagccttc

SEQ ID NO: 64137 - DNA, 21 bp, Homo sapiens
  source 1..21: mol_type = genomic DNA
aatacagaccaagagccttca

SEQ ID NO: 64138 - DNA, 17 bp, Homo sapiens
  source 1..17: mol_type = genomic DNA
aatacttaatttctgcc

SEQ ID NO: 64139 - DNA, 18 bp, Homo sapiens
  source 1..18: mol_type = genomic DNA
aatacttaatttctgcca

SEQ ID NO: 64140 - DNA, 16 bp, Homo sapiens
  source 1..16: mol_type = genomic DNA
aataggagcttaaacc

SEQ ID NO: 64141 - DNA, 17 bp, Homo sapiens
  source 1..17: mol_type = genomic DNA
aataggagcttaaaccc

SEQ ID NO: 64142 - DNA, 18 bp, Homo sapiens
  source 1..18: mol_type = genomic DNA
aataggagcttaaacccc

SEQ ID NO: 64143 - DNA, 19 bp, Homo sapiens
  source 1..19: mol_type = genomic DNA
aataggagcttaaaccccc

SEQ ID NO: 64144 - DNA, 20 bp, Homo sapiens
  source 1..20: mol_type = genomic DNA
aataggagcttaaaccccct

SEQ ID NO: 64145 - DNA, 18 bp, Homo sapiens
  source 1..18: mol_type = genomic DNA
aatagtaccgttaacttc

SEQ ID NO: 64146 - DNA, 19 bp, Homo sapiens
  source 1..19: mol_type = genomic DNA
aatagtaccgttaacttcc

SEQ ID NO: 64147 - DNA, 20 bp, Homo sapiens
  source 1..20: mol_type = genomic DNA
aatagtaccgttaacttcca

SEQ ID NO: 64148 - DNA, 18 bp, Homo sapiens
  source 1..18: mol_type = genomic DNA
aatcacgtcggggtcacc

SEQ ID NO: 64149 - DNA, 19 bp, Homo sapiens
  source 1..19: mol_type = genomic DNA
aatcacgtcggggtcacca

SEQ ID NO: 64150 - DNA, 17 bp, Homo sapiens
  source 1..17: mol_type = genomic DNA
aatcatatttaccaacc

SEQ ID NO: 64151 - DNA, 18 bp, Homo sapiens
  source 1..18: mol_type = genomic DNA
aatcatatttaccaacca

SEQ ID NO: 64152 - DNA, 18 bp, Homo sapiens
  source 1..18: mol_type = genomic DNA
aatccagcgatccgagtt

SEQ ID NO: 64153 - DNA, 19 bp, Homo sapiens
  source 1..19: mol_type = genomic DNA
aatccagcgatccgagttc

SEQ ID NO: 64154 - DNA, 20 bp, Homo sapiens
  source 1..20: mol_type = genomic DNA
aatccagcgatccgagttca

SEQ ID NO: 64155 - DNA, 21 bp, Homo sapiens
  source 1..21: mol_type = genomic DNA
aatccagcgatccgagttcaa

SEQ ID NO: 64156 - DNA, 22 bp, Homo sapiens
  source 1..22: mol_type = genomic DNA
aatccagcgatccgagttcaaa

SEQ ID NO: 64157 - DNA, 23 bp, Homo sapiens
  source 1..23: mol_type = genomic DNA
aatccagcgatccgagttcaaat

SEQ ID NO: 64158 - DNA, 23 bp, Homo sapiens
  source 1..23: mol_type = genomic DNA
aatccagcgatccgagttcgagt

SEQ ID NO: 64159 - DNA, 19 bp, Homo sapiens
  source 1..19: mol_type = genomic DNA
aatcccaccgctgccacca

SEQ ID NO: 64160 - DNA, 18 bp, Homo sapiens
  source 1..18: mol_type = genomic DNA
aatcccactcctgacacc

SEQ ID NO: 64161 - DNA, 19 bp, Homo sapiens
  source 1..19: mol_type = genomic DNA
aatcccactcctgacacca

SEQ ID NO: 64162 - DNA, 18 bp, Homo sapiens
  source 1..18: mol_type = genomic DNA
aatcccagcggggcctcc

SEQ ID NO: 64163 - DNA, 18 bp, Homo sapiens
  source 1..18: mol_type = genomic DNA
aatcccagcggtgcctcc

SEQ ID NO: 64164 - DNA, 19 bp, Homo sapiens
  source 1..19: mol_type = genomic DNA
aatcccagcggtgcctcca

SEQ ID NO: 64165 - DNA, 18 bp, Homo sapiens
  source 1..18: mol_type = genomic DNA
aatcccatcctcgtcgcc

SEQ ID NO: 64166 - DNA, 19 bp, Homo sapiens
  source 1..19: mol_type = genomic DNA
aatcccatcctcgtcgcca

SEQ ID NO: 64167 - DNA, 17 bp, Homo sapiens
  source 1..17: mol_type = genomic DNA
aatcccggacgagcccc

SEQ ID NO: 64168 - DNA, 18 bp, Homo sapiens
  source 1..18: mol_type = genomic DNA
aatcccggacgagccccc

SEQ ID NO: 64169 - DNA, 16 bp, Homo sapiens
  source 1..16: mol_type = genomic DNA
aatccgagtcacggca

SEQ ID NO: 64170 - DNA, 18 bp, Homo sapiens
  source 1..18: mol_type = genomic DNA
aatccgagtcacggcacc

SEQ ID NO: 64171 - DNA, 19 bp, Homo sapiens
  source 1..19: mol_type = genomic DNA
aatccgagtcacggcacca

SEQ ID NO: 64172 - DNA, 19 bp, Homo sapiens
  source 1..19: mol_type = genomic DNA
aatccggctcgaaggacca

SEQ ID NO: 64173 - DNA, 18 bp, Homo sapiens
  source 1..18: mol_type = genomic DNA
aatccgggtgccccctcc

SEQ ID NO: 64174 - DNA, 19 bp, Homo sapiens
  source 1..19: mol_type = genomic DNA
aatccgggtgccccctcca

SEQ ID NO: 64175 - DNA, 19 bp, Homo sapiens
  source 1..19: mol_type = genomic DNA
aatcctatatatcttacca

SEQ ID NO: 64176 - DNA, 19 bp, Homo sapiens
  source 1..19: mol_type = genomic DNA
aatcctgccgactacgcca

SEQ ID NO: 64177 - DNA, 18 bp, Homo sapiens
  source 1..18: mol_type = genomic DNA
aatctcgctggggcctcc

SEQ ID NO: 64178 - DNA, 18 bp, Homo sapiens
  source 1..18: mol_type = genomic DNA
aatctcggtggaacctcc

SEQ ID NO: 64179 - DNA, 19 bp, Homo sapiens
  source 1..19: mol_type = genomic DNA
aatctcggtggaacctcca

SEQ ID NO: 64180 - DNA, 18 bp, Homo sapiens
  source 1..18: mol_type = genomic DNA
aatctcggtgggacctcc

SEQ ID NO: 64181 - DNA, 19 bp, Homo sapiens
  source 1..19: mol_type = genomic DNA
aatctcggtgggacctcca

SEQ ID NO: 64182 - DNA, 16 bp, Homo sapiens
  source 1..16: mol_type = genomic DNA
aatctgacaacagagg

SEQ ID NO: 64183 - DNA, 17 bp, Homo sapiens
  source 1..17: mol_type = genomic DNA
aatctgacaacagaggc

SEQ ID NO: 64184 - DNA, 18 bp, Homo sapiens
  source 1..18: mol_type = genomic DNA
aatctgacaacagaggct

SEQ ID NO: 64185 - DNA, 19 bp, Homo sapiens
  source 1..19: mol_type = genomic DNA
aatctgacaacagaggctt

SEQ ID NO: 64186 - DNA, 20 bp, Homo sapiens
  source 1..20: mol_type = genomic DNA
aatctgacaacagaggctta

SEQ ID NO: 64187 - DNA, 21 bp, Homo sapiens
  source 1..21: mol_type = genomic DNA
aatctgacaacagaggcttac

SEQ ID NO: 64188 - DNA, 22 bp, Homo sapiens
  source 1..22: mol_type = genomic DNA
aatctgacaacagaggcttacg

SEQ ID NO: 64189 - DNA, 23 bp, Homo sapiens
  source 1..23: mol_type = genomic DNA
aatctgacaacagaggcttacga

SEQ ID NO: 64190 - DNA, 24 bp, Homo sapiens
  source 1..24: mol_type = genomic DNA
aatctgacaacagaggcttacgac

SEQ ID NO: 64191 - DNA, 16 bp, Homo sapiens
  source 1..16: mol_type = genomic DNA
aatgatttcgactcat

SEQ ID NO: 64192 - DNA, 17 bp, Homo sapiens
  source 1..17: mol_type = genomic DNA
aatgatttcgactcatt

SEQ ID NO: 64193 - DNA, 20 bp, Homo sapiens
  source 1..20: mol_type = genomic DNA
aatggataaggcatcagcct

SEQ ID NO: 64194 - DNA, 16 bp, Homo sapiens
  source 1..16: mol_type = genomic DNA
aatggataaggcattg

SEQ ID NO: 64195 - DNA, 17 bp, Homo sapiens
  source 1..17: mol_type = genomic DNA
aatggatagcgcattgg

SEQ ID NO: 64196 - DNA, 17 bp, Homo sapiens
  source 1..17: mol_type = genomic DNA
aatggtggagttaaaga

SEQ ID NO: 64197 - DNA, 18 bp, Homo sapiens
  source 1..18: mol_type = genomic DNA
aatggtggagttaaagac

SEQ ID NO: 64198 - DNA, 19 bp, Homo sapiens
  source 1..19: mol_type = genomic DNA
aatggtggagttaaagact

SEQ ID NO: 64199 - DNA, 20 bp, Homo sapiens
  source 1..20: mol_type = genomic DNA
aatggtggagttaaagactt

SEQ ID NO: 64200 - DNA, 21 bp, Homo sapiens
  source 1..21: mol_type = genomic DNA
aatggtggagttaaagacttt

SEQ ID NO: 64201 - DNA, 20 bp, Homo sapiens
  source 1..20: mol_type = genomic DNA
aatgttggttatacccttcc

SEQ ID NO: 64202 - DNA, 16 bp, Homo sapiens
  source 1..16: mol_type = genomic DNA
aatgtttagacgggct

SEQ ID NO: 64203 - DNA, 17 bp, Homo sapiens
  source 1..17: mol_type = genomic DNA
aatgtttagacgggctc

SEQ ID NO: 64204 - DNA, 18 bp, Homo sapiens
  source 1..18: mol_type = genomic DNA
aatgtttagacgggctca

SEQ ID NO: 64205 - DNA, 19 bp, Homo sapiens
  source 1..19: mol_type = genomic DNA
aatgtttagacgggctcac

SEQ ID NO: 64206 - DNA, 20 bp, Homo sapiens
  source 1..20: mol_type = genomic DNA
aatgtttagacgggctcaca

SEQ ID NO: 64207 - DNA, 21 bp, Homo sapiens
  source 1..21: mol_type = genomic DNA
aatgtttagacgggctcacat

SEQ ID NO: 64208 - DNA, 18 bp, Homo sapiens
  source 1..18: mol_type = genomic DNA
aattaactagttttgaca

SEQ ID NO: 64209 - DNA, 19 bp, Homo sapiens
  source 1..19: mol_type = genomic DNA
aattaactagttttgacaa

SEQ ID NO: 64210 - DNA, 20 bp, Homo sapiens
  source 1..20: mol_type = genomic DNA
aattaactagttttgacaac

SEQ ID NO: 64211 - DNA, 21 bp, Homo sapiens
  source 1..21: mol_type = genomic DNA
aattaactagttttgacaaca

SEQ ID NO: 64212 - DNA, 22 bp, Homo sapiens
  source 1..22: mol_type = genomic DNA
aattatgataatcatatttacc

SEQ ID NO: 64213 - DNA, 16 bp, Homo sapiens
  source 1..16: mol_type = genomic DNA
aattctcgcctgccac

SEQ ID NO: 64214 - DNA, 21 bp, Homo sapiens
  source 1..21: mol_type = genomic DNA
aattttggtgcaactccaaat

SEQ ID NO: 64215 - DNA, 22 bp, Homo sapiens
  source 1..22: mol_type = genomic DNA
aattttggtgcaactccaaata

SEQ ID NO: 64216 - DNA, 18 bp, Homo sapiens
  source 1..18: mol_type = genomic DNA
acaaaacgaatgatttcg

SEQ ID NO: 64217 - DNA, 22 bp, Homo sapiens
  source 1..22: mol_type = genomic DNA
acaaaacgaatgatttcgactc

SEQ ID NO: 64218 - DNA, 23 bp, Homo sapiens
  source 1..23: mol_type = genomic DNA
acaaaacgaatgatttcgactca

SEQ ID NO: 64219 - DNA, 18 bp, Homo sapiens
  source 1..18: mol_type = genomic DNA
acaaagcacccaacttac

SEQ ID NO: 64220 - DNA, 19 bp, Homo sapiens
  source 1..19: mol_type = genomic DNA
acaacatggctttctcacc

SEQ ID NO: 64221 - DNA, 20 bp, Homo sapiens
  source 1..20: mol_type = genomic DNA
acaacatggctttctcacca

SEQ ID NO: 64222 - DNA, 17 bp, Homo sapiens
  source 1..17: mol_type = genomic DNA
acaacgatggtttttca

SEQ ID NO: 64223 - DNA, 16 bp, Homo sapiens
  source 1..16: mol_type = genomic DNA
acaagaactgctaact

SEQ ID NO: 64224 - DNA, 17 bp, Homo sapiens
  source 1..17: mol_type = genomic DNA
acaagaactgctaactc

SEQ ID NO: 64225 - DNA, 18 bp, Homo sapiens
  source 1..18: mol_type = genomic DNA
acaagaactgctaactca

SEQ ID NO: 64226 - DNA, 19 bp, Homo sapiens
  source 1..19: mol_type = genomic DNA
acaagaactgctaactcat

SEQ ID NO: 64227 - DNA, 20 bp, Homo sapiens
  source 1..20: mol_type = genomic DNA
acaagaactgctaactcatg

SEQ ID NO: 64228 - DNA, 21 bp, Homo sapiens
  source 1..21: mol_type = genomic DNA
acaagaactgctaactcatgc

SEQ ID NO: 64229 - DNA, 22 bp, Homo sapiens
  source 1..22: mol_type = genomic DNA
acaagaactgctaactcatgcc

SEQ ID NO: 64230 - DNA, 18 bp, Homo sapiens
  source 1..18: mol_type = genomic DNA
acacctctttacagtgac

SEQ ID NO: 64231 - DNA, 19 bp, Homo sapiens
  source 1..19: mol_type = genomic DNA
acacctctttacagtgacc

SEQ ID NO: 64232 - DNA, 20 bp, Homo sapiens
  source 1..20: mol_type = genomic DNA
acacctctttacagtgacca

SEQ ID NO: 64233 - DNA, 17 bp, Homo sapiens
  source 1..17: mol_type = genomic DNA
acacttaggagatttca

SEQ ID NO: 64234 - DNA, 19 bp, Homo sapiens
  source 1..19: mol_type = genomic DNA
acacttaggagatttcaac

SEQ ID NO: 64235 - DNA, 20 bp, Homo sapiens
  source 1..20: mol_type = genomic DNA
acacttaggagatttcaact

SEQ ID NO: 64236 - DNA, 17 bp, Homo sapiens
  source 1..17: mol_type = genomic DNA
acagaccaagagccttc

SEQ ID NO: 64237 - DNA, 18 bp, Homo sapiens
  source 1..18: mol_type = genomic DNA
acagaccaagagccttca

SEQ ID NO: 64238 - DNA, 16 bp, Homo sapiens
  source 1..16: mol_type = genomic DNA
acagctatccattggt

SEQ ID NO: 64239 - DNA, 17 bp, Homo sapiens
  source 1..17: mol_type = genomic DNA
acagctatccattggtc

SEQ ID NO: 64240 - DNA, 18 bp, Homo sapiens
  source 1..18: mol_type = genomic DNA
acagctatccattggtct

SEQ ID NO: 64241 - DNA, 18 bp, Homo sapiens
  source 1..18: mol_type = genomic DNA
acaggagatcctgggttc

SEQ ID NO: 64242 - DNA, 19 bp, Homo sapiens
  source 1..19: mol_type = genomic DNA
acaggagatcctgggttcg

SEQ ID NO: 64243 - DNA, 20 bp, Homo sapiens
  source 1..20: mol_type = genomic DNA
acagtcagaggttcaattcc

SEQ ID NO: 64244 - DNA, 23 bp, Homo sapiens
  source 1..23: mol_type = genomic DNA
acagtcagaggttcaattcctct

SEQ ID NO: 64245 - DNA, 16 bp, Homo sapiens
  source 1..16: mol_type = genomic DNA
acatcaccccataaac

SEQ ID NO: 64246 - DNA, 17 bp, Homo sapiens
  source 1..17: mol_type = genomic DNA
acatcaccccataaaca

SEQ ID NO: 64247 - DNA, 19 bp, Homo sapiens
  source 1..19: mol_type = genomic DNA
acatcaccccataaacacc

SEQ ID NO: 64248 - DNA, 20 bp, Homo sapiens
  source 1..20: mol_type = genomic DNA
acatcaccccataaacacca

SEQ ID NO: 64249 - DNA, 16 bp, Homo sapiens
  source 1..16: mol_type = genomic DNA
acatcagattgtgaat

SEQ ID NO: 64250 - DNA, 17 bp, Homo sapiens
  source 1..17: mol_type = genomic DNA
acatcagattgtgaatc

SEQ ID NO: 64251 - DNA, 18 bp, Homo sapiens
  source 1..18: mol_type = genomic DNA
acatcagattgtgaatct

SEQ ID NO: 64252 - DNA, 19 bp, Homo sapiens
  source 1..19: mol_type = genomic DNA
acatcagattgtgaatctg

SEQ ID NO: 64253 - DNA, 20 bp, Homo sapiens
  source 1..20: mol_type = genomic DNA
acatcagattgtgaatctga

SEQ ID NO: 64254 - DNA, 21 bp, Homo sapiens
  source 1..21: mol_type = genomic DNA
acatcagattgtgaatctgac

SEQ ID NO: 64255 - DNA, 22 bp, Homo sapiens
  source 1..22: mol_type = genomic DNA
acatcagattgtgaatctgaca

SEQ ID NO: 64256 - DNA, 16 bp, Homo sapiens
  source 1..16: mol_type = genomic DNA
acatggctttctcacc

SEQ ID NO: 64257 - DNA, 17 bp, Homo sapiens
  source 1..17: mol_type = genomic DNA
acatggctttctcacca

SEQ ID NO: 64258 - DNA, 24 bp, Homo sapiens
  source 1..24: mol_type = genomic DNA
acatggtctagcggttaggattcc

SEQ ID NO: 64259 - DNA, 25 bp, Homo sapiens
  source 1..25: mol_type = genomic DNA
acatggtctagcggttaggattcct

SEQ ID NO: 64260 - DNA, 19 bp, Homo sapiens
  source 1..19: mol_type = genomic DNA
acattcaaaaaagagtacc

SEQ ID NO: 64261 - DNA, 20 bp, Homo sapiens
  source 1..20: mol_type = genomic DNA
acattcaaaaaagagtacca

SEQ ID NO: 64262 - DNA, 22 bp, Homo sapiens
  source 1..22: mol_type = genomic DNA
accaacacctctttacagtgac

SEQ ID NO: 64263 - DNA, 18 bp, Homo sapiens
  source 1..18: mol_type = genomic DNA
accagaatggccgagtgg

SEQ ID NO: 64264 - DNA, 16 bp, Homo sapiens
  source 1..16: mol_type = genomic DNA
accaggatggccgagt

SEQ ID NO: 64265 - DNA, 18 bp, Homo sapiens
  source 1..18: mol_type = genomic DNA
accaggatggccgagtgg

SEQ ID NO: 64266 - DNA, 19 bp, Homo sapiens
  source 1..19: mol_type = genomic DNA
accaggatggccgagtggt

SEQ ID NO: 64267 - DNA, 20 bp, Homo sapiens
  source 1..20: mol_type = genomic DNA
accaggatggccgagtggtt

SEQ ID NO: 64268 - DNA, 22 bp, Homo sapiens
  source 1..22: mol_type = genomic DNA
accaggatggccgagtggttaa

SEQ ID NO: 64269 - DNA, 24 bp, Homo sapiens
  source 1..24: mol_type = genomic DNA
accaggatggccgagtggttaagg

SEQ ID NO: 64270 - DNA, 17 bp, Homo sapiens
  source 1..17: mol_type = genomic DNA
accaggcggaaacacca

SEQ ID NO: 64271 - DNA, 18 bp, Homo sapiens
  source 1..18: mol_type = genomic DNA
accaggggtcgcgagttc

SEQ ID NO: 64272 - DNA, 16 bp, Homo sapiens
  source 1..16: mol_type = genomic DNA
accatcctctgctacc

SEQ ID NO: 64273 - DNA, 17 bp, Homo sapiens
  source 1..17: mol_type = genomic DNA
accatcctctgctacca

SEQ ID NO: 64274 - DNA, 18 bp, Homo sapiens
  source 1..18: mol_type = genomic DNA
acccaacttacacttagg

SEQ ID NO: 64275 - DNA, 21 bp, Homo sapiens
  source 1..21: mol_type = genomic DNA
acccaacttacacttaggaga

SEQ ID NO: 64276 - DNA, 17 bp, Homo sapiens
  source 1..17: mol_type = genomic DNA
acccagaggtcgatgga

SEQ ID NO: 64277 - DNA, 18 bp, Homo sapiens
  source 1..18: mol_type = genomic DNA
acccagaggtcgatggat

SEQ ID NO: 64278 - DNA, 19 bp, Homo sapiens
  source 1..19: mol_type = genomic DNA
acccagaggtcgatggatc

SEQ ID NO: 64279 - DNA, 20 bp, Homo sapiens
  source 1..20: mol_type = genomic DNA
acccagaggtcgatggatcg

SEQ ID NO: 64280 - DNA, 21 bp, Homo sapiens
  source 1..21: mol_type = genomic DNA
acccagaggtcgatggatcga

SEQ ID NO: 64281 - DNA, 22 bp, Homo sapiens
  source 1..22: mol_type = genomic DNA
acccagaggtcgatggatcgaa

SEQ ID NO: 64282 - DNA, 16 bp, Homo sapiens
  source 1..16: mol_type = genomic DNA
accccactcctggtac

SEQ ID NO: 64283 - DNA, 17 bp, Homo sapiens
  source 1..17: mol_type = genomic DNA
accccactcctggtacc

SEQ ID NO: 64284 - DNA, 18 bp, Homo sapiens
  source 1..18: mol_type = genomic DNA
accccactcctggtacca

SEQ ID NO: 64285 - DNA, 16 bp, Homo sapiens
  source 1..16: mol_type = genomic DNA
acccccttatttctac

SEQ ID NO: 64286 - DNA, 17 bp, Homo sapiens
  source 1..17: mol_type = genomic DNA
acccccttatttctacc

SEQ ID NO: 64287 - DNA, 18 bp, Homo sapiens
  source 1..18: mol_type = genomic DNA
acccccttatttctacca

SEQ ID NO: 64288 - DNA, 18 bp, Homo sapiens
  source 1..18: mol_type = genomic DNA
accccgaaaatgttggtt

SEQ ID NO: 64289 - DNA, 17 bp, Homo sapiens
  source 1..17: mol_type = genomic DNA
accccgtccgtgcctcc

SEQ ID NO: 64290 - DNA, 18 bp, Homo sapiens
  source 1..18: mol_type = genomic DNA
accccgtccgtgcctcca

SEQ ID NO: 64291 - DNA, 16 bp, Homo sapiens
  source 1..16: mol_type = genomic DNA
accccttatttacccc

SEQ ID NO: 64292 - DNA, 17 bp, Homo sapiens
  source 1..17: mol_type = genomic DNA
accccttatttacccca

SEQ ID NO: 64293 - DNA, 18 bp, Homo sapiens
  source 1..18: mol_type = genomic DNA
accctgctcgctgcgcca

SEQ ID NO: 64294 - DNA, 16 bp, Homo sapiens
  source 1..16: mol_type = genomic DNA
acccttcccgtactac

SEQ ID NO: 64295 - DNA, 17 bp, Homo sapiens
  source 1..17: mol_type = genomic DNA
acccttcccgtactacc

SEQ ID NO: 64296 - DNA, 18 bp, Homo sapiens
  source 1..18: mol_type = genomic DNA
acccttcccgtactacca

SEQ ID NO: 64297 - DNA, 17 bp, Homo sapiens
  source 1..17: mol_type = genomic DNA
accgagcggaaacacca

SEQ ID NO: 64298 - DNA, 16 bp, Homo sapiens
  source 1..16: mol_type = genomic DNA
accggagatgaaaacc

SEQ ID NO: 64299 - DNA, 17 bp, Homo sapiens
  source 1..17: mol_type = genomic DNA
accggagatgaaaacct

SEQ ID NO: 64300 - DNA, 18 bp, Homo sapiens
  source 1..18: mol_type = genomic DNA
accggagatgaaaacctt

SEQ ID NO: 64301 - DNA, 19 bp, Homo sapiens
  source 1..19: mol_type = genomic DNA
accggagatgaaaaccttt

SEQ ID NO: 64302 - DNA, 20 bp, Homo sapiens
  source 1..20: mol_type = genomic DNA
accggagatgaaaacctttt

SEQ ID NO: 64303 - DNA, 21 bp, Homo sapiens
  source 1..21: mol_type = genomic DNA
accggagatgaaaaccttttt

SEQ ID NO: 64304 - DNA, 22 bp, Homo sapiens
  source 1..22: mol_type = genomic DNA
accggagatgaaaacctttttc

SEQ ID NO: 64305 - DNA, 23 bp, Homo sapiens
  source 1..23: mol_type = genomic DNA
accggagatgaaaacctttttcc

SEQ ID NO: 64306 - DNA, 17 bp, Homo sapiens
  source 1..17: mol_type = genomic DNA
accgggcagaagcacca

SEQ ID NO: 64307 - DNA, 16 bp, Homo sapiens
  source 1..16: mol_type = genomic DNA
accgggcggaaacacc

SEQ ID NO: 64308 - DNA, 17 bp, Homo sapiens
  source 1..17: mol_type = genomic DNA
accgggcggaaacacca

SEQ ID NO: 64309 - DNA, 18 bp, Homo sapiens
  source 1..18: mol_type = genomic DNA
acctcagagggggcacca

SEQ ID NO: 64310 - DNA, 16 bp, Homo sapiens
  source 1..16: mol_type = genomic DNA
acctctttacagtgac

SEQ ID NO: 64311 - DNA, 17 bp, Homo sapiens
  source 1..17: mol_type = genomic DNA
acctctttacagtgacc

SEQ ID NO: 64312 - DNA, 18 bp, Homo sapiens
  source 1..18: mol_type = genomic DNA
acctctttacagtgacca

SEQ ID NO: 64313 - DNA, 16 bp, Homo sapiens
  source 1..16: mol_type = genomic DNA
acctgccggggcttcc

SEQ ID NO: 64314 - DNA, 17 bp, Homo sapiens
  source 1..17: mol_type = genomic DNA
acctgccggggcttcca

SEQ ID NO: 64315 - DNA, 19 bp, Homo sapiens
  source 1..19: mol_type = genomic DNA
acctttttccaaggacacc

SEQ ID NO: 64316 - DNA, 20 bp, Homo sapiens
  source 1..20: mol_type = genomic DNA
acctttttccaaggacacca

SEQ ID NO: 64317 - DNA, 17 bp, Homo sapiens
  source 1..17: mol_type = genomic DNA
acgaatgatttcgactc

SEQ ID NO: 64318 - DNA, 18 bp, Homo sapiens
  source 1..18: mol_type = genomic DNA
acgaatgatttcgactca

SEQ ID NO: 64319 - DNA, 19 bp, Homo sapiens
  source 1..19: mol_type = genomic DNA
acgaatgatttcgactcat

SEQ ID NO: 64320 - DNA, 20 bp, Homo sapiens
  source 1..20: mol_type = genomic DNA
acgaatgatttcgactcatt

SEQ ID NO: 64321 - DNA, 22 bp, Homo sapiens
  source 1..22: mol_type = genomic DNA
acgaatgatttcgactcattaa

SEQ ID NO: 64322 - DNA, 23 bp, Homo sapiens
  source 1..23: mol_type = genomic DNA
acgaatgatttcgactcattaaa

SEQ ID NO: 64323 - DNA, 24 bp, Homo sapiens
  source 1..24: mol_type = genomic DNA
acgaatgatttcgactcattaaat

SEQ ID NO: 64324 - DNA, 18 bp, Homo sapiens
  source 1..18: mol_type = genomic DNA
acgaccccttatttaccc

SEQ ID NO: 64325 - DNA, 19 bp, Homo sapiens
  source 1..19: mol_type = genomic DNA
acgaccccttatttacccc

SEQ ID NO: 64326 - DNA, 20 bp, Homo sapiens
  source 1..20: mol_type = genomic DNA
acgaccccttatttacccca

SEQ ID NO: 64327 - DNA, 18 bp, Homo sapiens
  source 1..18: mol_type = genomic DNA
acgatggtttttcatatc

SEQ ID NO: 64328 - DNA, 19 bp, Homo sapiens
  source 1..19: mol_type = genomic DNA
acgatggtttttcatatca

SEQ ID NO: 64329 - DNA, 20 bp, Homo sapiens
  source 1..20: mol_type = genomic DNA
acgatggtttttcatatcat

SEQ ID NO: 64330 - DNA, 19 bp, Homo sapiens
  source 1..19: mol_type = genomic DNA
acgccaaggtcgcgggttc

SEQ ID NO: 64331 - DNA, 16 bp, Homo sapiens
  source 1..16: mol_type = genomic DNA
acgggctcacatcacc

SEQ ID NO: 64332 - DNA, 17 bp, Homo sapiens
  source 1..17: mol_type = genomic DNA
acgggctcacatcaccc

SEQ ID NO: 64333 - DNA, 18 bp, Homo sapiens
  source 1..18: mol_type = genomic DNA
actaagtgtttgtgggtt

SEQ ID NO: 64334 - DNA, 19 bp, Homo sapiens
  source 1..19: mol_type = genomic DNA
actaagtgtttgtgggttt

SEQ ID NO: 64335 - DNA, 17 bp, Homo sapiens
  source 1..17: mol_type = genomic DNA
actcaagttctggtctc

SEQ ID NO: 64336 - DNA, 18 bp, Homo sapiens
  source 1..18: mol_type = genomic DNA
actcaagttctggtctcc

SEQ ID NO: 64337 - DNA, 18 bp, Homo sapiens
  source 1..18: mol_type = genomic DNA
actccaaataaaagtacc

SEQ ID NO: 64338 - DNA, 19 bp, Homo sapiens
  source 1..19: mol_type = genomic DNA
actccaaataaaagtacca

SEQ ID NO: 64339 - DNA, 20 bp, Homo sapiens
  source 1..20: mol_type = genomic DNA
actccagatcagaaggttgc

SEQ ID NO: 64340 - DNA, 17 bp, Homo sapiens
  source 1..17: mol_type = genomic DNA
actcccggtgtgggaac

SEQ ID NO: 64341 - DNA, 18 bp, Homo sapiens
  source 1..18: mol_type = genomic DNA
actcccggtgtgggaacc

SEQ ID NO: 64342 - DNA, 19 bp, Homo sapiens
  source 1..19: mol_type = genomic DNA
actcccggtgtgggaacca

SEQ ID NO: 64343 - DNA, 17 bp, Homo sapiens
  source 1..17: mol_type = genomic DNA
actcctggctggctcgc

SEQ ID NO: 64344 - DNA, 18 bp, Homo sapiens
  source 1..18: mol_type = genomic DNA
actcctggctggctcgcc

SEQ ID NO: 64345 - DNA, 17 bp, Homo sapiens
  source 1..17: mol_type = genomic DNA
actctggactctgaatc

SEQ ID NO: 64346 - DNA, 18 bp, Homo sapiens
  source 1..18: mol_type = genomic DNA
actctggactctgaatcc

SEQ ID NO: 64347 - DNA, 19 bp, Homo sapiens
  source 1..19: mol_type = genomic DNA
actctggactctgaatcca

SEQ ID NO: 64348 - DNA, 21 bp, Homo sapiens
  source 1..21: mol_type = genomic DNA
actctggactctgaatccagc

SEQ ID NO: 64349 - DNA, 19 bp, Homo sapiens
  source 1..19: mol_type = genomic DNA
actcttttagtataaatag

SEQ ID NO: 64350 - DNA, 16 bp, Homo sapiens
  source 1..16: mol_type = genomic DNA
actgtaaagctaactt

SEQ ID NO: 64351 - DNA, 20 bp, Homo sapiens
  source 1..20: mol_type = genomic DNA
actgtaaagctaacttagca

SEQ ID NO: 64352 - DNA, 22 bp, Homo sapiens
  source 1..22: mol_type = genomic DNA
actgtaaagctaacttagcatt

SEQ ID NO: 64353 - DNA, 23 bp, Homo sapiens
  source 1..23: mol_type = genomic DNA
actgtaaagctaacttagcatta

SEQ ID NO: 64354 - DNA, 16 bp, Homo sapiens
  source 1..16: mol_type = genomic DNA
acttaacttgaccgct

SEQ ID NO: 64355 - DNA, 17 bp, Homo sapiens
  source 1..17: mol_type = genomic DNA
acttaacttgaccgctc

SEQ ID NO: 64356 - DNA, 18 bp, Homo sapiens
  source 1..18: mol_type = genomic DNA
acttaacttgaccgctct

SEQ ID NO: 64357 - DNA, 19 bp, Homo sapiens
  source 1..19: mol_type = genomic DNA
acttaacttgaccgctctg

SEQ ID NO: 64358 - DNA, 20 bp, Homo sapiens
  source 1..20: mol_type = genomic DNA
acttaacttgaccgctctga

SEQ ID NO: 64359 - DNA, 21 bp, Homo sapiens
  source 1..21: mol_type = genomic DNA
acttaacttgaccgctctgac

SEQ ID NO: 64360 - DNA, 22 bp, Homo sapiens
  source 1..22: mol_type = genomic DNA
acttaacttgaccgctctgacc

SEQ ID NO: 64361 - DNA, 23 bp, Homo sapiens
  source 1..23: mol_type = genomic DNA
acttaacttgaccgctctgacca

SEQ ID NO: 64362 - DNA, 16 bp, Homo sapiens
  source 1..16: mol_type = genomic DNA
acttacacttaggaga

SEQ ID NO: 64363 - DNA, 17 bp, Homo sapiens
  source 1..17: mol_type = genomic DNA
acttacacttaggagat

SEQ ID NO: 64364 - DNA, 18 bp, Homo sapiens
  source 1..18: mol_type = genomic DNA
acttacacttaggagatt

SEQ ID NO: 64365 - DNA, 19 bp, Homo sapiens
  source 1..19: mol_type = genomic DNA
acttacacttaggagattt

SEQ ID NO: 64366 - DNA, 20 bp, Homo sapiens
  source 1..20: mol_type = genomic DNA
acttacacttaggagatttc

SEQ ID NO: 64367 - DNA, 21 bp, Homo sapiens
  source 1..21: mol_type = genomic DNA
acttacacttaggagatttca

SEQ ID NO: 64368 - DNA, 22 bp, Homo sapiens
  source 1..22: mol_type = genomic DNA
acttacacttaggagatttcaa

SEQ ID NO: 64369 - DNA, 16 bp, Homo sapiens
  source 1..16: mol_type = genomic DNA
acttaggagatttcaa

SEQ ID NO: 64370 - DNA, 17 bp, Homo sapiens
  source 1..17: mol_type = genomic DNA
acttaggagatttcaac

SEQ ID NO: 64371 - DNA, 18 bp, Homo sapiens
  source 1..18: mol_type = genomic DNA
acttaggagatttcaact

SEQ ID NO: 64372 - DNA, 19 bp, Homo sapiens
  source 1..19: mol_type = genomic DNA
acttaggagatttcaactt

SEQ ID NO: 64373 - DNA, 20 bp, Homo sapiens
  source 1..20: mol_type = genomic DNA
acttaggagatttcaactta

SEQ ID NO: 64374 - DNA, 21 bp, Homo sapiens
  source 1..21: mol_type = genomic DNA
acttaggagatttcaacttaa

SEQ ID NO: 64375 - DNA, 16 bp, Homo sapiens
  source 1..16: mol_type = genomic DNA
acttgaccgctctgac

SEQ ID NO: 64376 - DNA, 17 bp, Homo sapiens
  source 1..17: mol_type = genomic DNA
acttgaccgctctgacc

SEQ ID NO: 64377 - DNA, 18 bp, Homo sapiens
  source 1..18: mol_type = genomic DNA
acttgaccgctctgacca

SEQ ID NO: 64378 - DNA, 16 bp, Homo sapiens
  source 1..16: mol_type = genomic DNA
actttacagtcagagg

SEQ ID NO: 64379 - DNA, 18 bp, Homo sapiens
  source 1..18: mol_type = genomic DNA
actttacagtcagaggtt

SEQ ID NO: 64380 - DNA, 19 bp, Homo sapiens
  source 1..19: mol_type = genomic DNA
actttacagtcagaggttc

SEQ ID NO: 64381 - DNA, 20 bp, Homo sapiens
  source 1..20: mol_type = genomic DNA
actttacagtcagaggttca

SEQ ID NO: 64382 - DNA, 24 bp, Homo sapiens
  source 1..24: mol_type = genomic DNA
actttgatagagtaaataatagga

SEQ ID NO: 64383 - DNA, 16 bp, Homo sapiens
  source 1..16: mol_type = genomic DNA
acttttaaaggataac

SEQ ID NO: 64384 - DNA, 17 bp, Homo sapiens
  source 1..17: mol_type = genomic DNA
acttttaaaggataaca

SEQ ID NO: 64385 - DNA, 18 bp, Homo sapiens
  source 1..18: mol_type = genomic DNA
acttttaaaggataacag

SEQ ID NO: 64386 - DNA, 19 bp, Homo sapiens
  source 1..19: mol_type = genomic DNA
acttttaaaggataacagc

SEQ ID NO: 64387 - DNA, 20 bp, Homo sapiens
  source 1..20: mol_type = genomic DNA
acttttaaaggataacagct

SEQ ID NO: 64388 - DNA, 16 bp, Homo sapiens
  source 1..16: mol_type = genomic DNA
actttttctctgacca

SEQ ID NO: 64389 - DNA, 17 bp, Homo sapiens
  source 1..17: mol_type = genomic DNA
agaaagctcacaagaac

SEQ ID NO: 64390 - DNA, 18 bp, Homo sapiens
  source 1..18: mol_type = genomic DNA
agaaagctcacaagaact

SEQ ID NO: 64391 - DNA, 20 bp, Homo sapiens
  source 1..20: mol_type = genomic DNA
agaaagctcacaagaactgc

SEQ ID NO: 64392 - DNA, 21 bp, Homo sapiens
  source 1..21: mol_type = genomic DNA
agaaagctcacaagaactgct

SEQ ID NO: 64393 - DNA, 16 bp, Homo sapiens
  source 1..16: mol_type = genomic DNA
agaaatatgtctgata

SEQ ID NO: 64394 - DNA, 17 bp, Homo sapiens
  source 1..17: mol_type = genomic DNA
agaaatatgtctgataa

SEQ ID NO: 64395 - DNA, 18 bp, Homo sapiens
  source 1..18: mol_type = genomic DNA
agaaatatgtctgataaa

SEQ ID NO: 64396 - DNA, 19 bp, Homo sapiens
  source 1..19: mol_type = genomic DNA
agaaatatgtctgataaaa

SEQ ID NO: 64397 - DNA, 20 bp, Homo sapiens
  source 1..20: mol_type = genomic DNA
agaaatatgtctgataaaag

SEQ ID NO: 64398 - DNA, 21 bp, Homo sapiens
  source 1..21: mol_type = genomic DNA
agaaatatgtctgataaaaga

SEQ ID NO: 64399 - DNA, 16 bp, Homo sapiens
  source 1..16: mol_type = genomic DNA
agaaatttaggttaaa

SEQ ID NO: 64400 - DNA, 17 bp, Homo sapiens
  source 1..17: mol_type = genomic DNA
agaaatttaggttaaat

SEQ ID NO: 64401 - DNA, 18 bp, Homo sapiens
  source 1..18: mol_type = genomic DNA
agaaatttaggttaaata

SEQ ID NO: 64402 - DNA, 19 bp, Homo sapiens
  source 1..19: mol_type = genomic DNA
agaaatttaggttaaatac

SEQ ID NO: 64403 - DNA, 17 bp, Homo sapiens
  source 1..17: mol_type = genomic DNA
agaactgctaactcatg

SEQ ID NO: 64404 - DNA, 18 bp, Homo sapiens
  source 1..18: mol_type = genomic DNA
agaactgctaactcatgc

SEQ ID NO: 64405 - DNA, 19 bp, Homo sapiens
  source 1..19: mol_type = genomic DNA
agaactgctaactcatgcc

SEQ ID NO: 64406 - DNA, 20 bp, Homo sapiens
  source 1..20: mol_type = genomic DNA
agaactgctaactcatgccc

SEQ ID NO: 64407 - DNA, 22 bp, Homo sapiens
  source 1..22: mol_type = genomic DNA
agaactgctaactcatgccccc

SEQ ID NO: 64408 - DNA, 17 bp, Homo sapiens
  source 1..17: mol_type = genomic DNA
agaagattgagggttcg

SEQ ID NO: 64409 - DNA, 17 bp, Homo sapiens
  source 1..17: mol_type = genomic DNA
agaagattgcaggttcg

SEQ ID NO: 64410 - DNA, 23 bp, Homo sapiens
  source 1..23: mol_type = genomic DNA
agaatcttagctttgggtgctaa

SEQ ID NO: 64411 - DNA, 16 bp, Homo sapiens
  source 1..16: mol_type = genomic DNA
agaccaagagccttca

SEQ ID NO: 64412 - DNA, 22 bp, Homo sapiens
  source 1..22: mol_type = genomic DNA
agaccggggttcaattccccga

SEQ ID NO: 64413 - DNA, 17 bp, Homo sapiens
  source 1..17: mol_type = genomic DNA
agacgggctcacatcac

SEQ ID NO: 64414 - DNA, 18 bp, Homo sapiens
  source 1..18: mol_type = genomic DNA
agacgggctcacatcacc

SEQ ID NO: 64415 - DNA, 19 bp, Homo sapiens
  source 1..19: mol_type = genomic DNA
agacgggctcacatcaccc

SEQ ID NO: 64416 - DNA, 20 bp, Homo sapiens
  source 1..20: mol_type = genomic DNA
agactcaagttctggtctcc

SEQ ID NO: 64417 - DNA, 23 bp, Homo sapiens
  source 1..23: mol_type = genomic DNA
agactcaagttctggtctccgga

SEQ ID NO: 64418 - DNA, 24 bp, Homo sapiens
  source 1..24: mol_type = genomic DNA
agactcaagttctggtctccggat

SEQ ID NO: 64419 - DNA, 16 bp, Homo sapiens
  source 1..16: mol_type = genomic DNA
agactttttctctgac

SEQ ID NO: 64420 - DNA, 17 bp, Homo sapiens
  source 1..17: mol_type = genomic DNA
agactttttctctgacc

SEQ ID NO: 64421 - DNA, 18 bp, Homo sapiens
  source 1..18: mol_type = genomic DNA
agactttttctctgacca

SEQ ID NO: 64422 - DNA, 17 bp, Homo sapiens
  source 1..17: mol_type = genomic DNA
agagaatagtttaaatt

SEQ ID NO: 64423 - DNA, 16 bp, Homo sapiens
  source 1..16: mol_type = genomic DNA
agagtaaataatagga

SEQ ID NO: 64424 - DNA, 18 bp, Homo sapiens
  source 1..18: mol_type = genomic DNA
agagtaaataataggagc

SEQ ID NO: 64425 - DNA, 16 bp, Homo sapiens
  source 1..16: mol_type = genomic DNA
agagtgtagcttaaca

SEQ ID NO: 64426 - DNA, 17 bp, Homo sapiens
  source 1..17: mol_type = genomic DNA
agagtgtagcttaacac

SEQ ID NO: 64427 - DNA, 18 bp, Homo sapiens
  source 1..18: mol_type = genomic DNA
agagtgtagcttaacaca

SEQ ID NO: 64428 - DNA, 24 bp, Homo sapiens
  source 1..24: mol_type = genomic DNA
agagtgtagcttaacacaaagcac

SEQ ID NO: 64429 - DNA, 25 bp, Homo sapiens
  source 1..25: mol_type = genomic DNA
agagtgtagcttaacacaaagcacc

SEQ ID NO: 64430 - DNA, 16 bp, Homo sapiens
  source 1..16: mol_type = genomic DNA
agattaagagaaccaa

SEQ ID NO: 64431 - DNA, 17 bp, Homo sapiens
  source 1..17: mol_type = genomic DNA
agattaagagaaccaac

SEQ ID NO: 64432 - DNA, 18 bp, Homo sapiens
  source 1..18: mol_type = genomic DNA
agattaagagaaccaaca

SEQ ID NO: 64433 - DNA, 19 bp, Homo sapiens
  source 1..19: mol_type = genomic DNA
agattaagagaaccaacac

SEQ ID NO: 64434 - DNA, 20 bp, Homo sapiens
  source 1..20: mol_type = genomic DNA
agattaagagaaccaacacc

SEQ ID NO: 64435 - DNA, 20 bp, Homo sapiens
  source 1..20: mol_type = genomic DNA
agattgagggttcgagtccc

SEQ ID NO: 64436 - DNA, 21 bp, Homo sapiens
  source 1..21: mol_type = genomic DNA
agattgagggttcgagtccct

SEQ ID NO: 64437 - DNA, 23 bp, Homo sapiens
  source 1..23: mol_type = genomic DNA
agattgagggttcgagtcccttc

SEQ ID NO: 64438 - DNA, 24 bp, Homo sapiens
  source 1..24: mol_type = genomic DNA
agattgagggttcgagtcccttcg

SEQ ID NO: 64439 - DNA, 23 bp, Homo sapiens
  source 1..23: mol_type = genomic DNA
agattgcaggttcgagtcctgcc

SEQ ID NO: 64440 - DNA, 16 bp, Homo sapiens
  source 1..16: mol_type = genomic DNA
agattgtgaatctgac

SEQ ID NO: 64441 - DNA, 17 bp, Homo sapiens
  source 1..17: mol_type = genomic DNA
agattgtgaatctgaca

SEQ ID NO: 64442 - DNA, 18 bp, Homo sapiens
  source 1..18: mol_type = genomic DNA
agattgtgaatctgacaa

SEQ ID NO: 64443 - DNA, 19 bp, Homo sapiens
  source 1..19: mol_type = genomic DNA
agattgtgaatctgacaac

SEQ ID NO: 64444 - DNA, 20 bp, Homo sapiens
  source 1..20: mol_type = genomic DNA
agattgtgaatctgacaaca

SEQ ID NO: 64445 - DNA, 21 bp, Homo sapiens
  source 1..21: mol_type = genomic DNA
agattgtgaatctgacaacag

SEQ ID NO: 64446 - DNA, 22 bp, Homo sapiens
  source 1..22: mol_type = genomic DNA
agattgtgaatctgacaacaga

SEQ ID NO: 64447 - DNA, 21 bp, Homo sapiens
  source 1..21: mol_type = genomic DNA
agatttcaacttaacttgacc

SEQ ID NO: 64448 - DNA, 18 bp, Homo sapiens
  source 1..18: mol_type = genomic DNA
agcacccaacttacactt

SEQ ID NO: 64449 - DNA, 19 bp, Homo sapiens
  source 1..19: mol_type = genomic DNA
agcacccaacttacactta

SEQ ID NO: 64450 - DNA, 21 bp, Homo sapiens
  source 1..21: mol_type = genomic DNA
agcacccaacttacacttagg

SEQ ID NO: 64451 - DNA, 16 bp, Homo sapiens
  source 1..16: mol_type = genomic DNA
agcactctggactctg

SEQ ID NO: 64452 - DNA, 17 bp, Homo sapiens
  source 1..17: mol_type = genomic DNA
agcactctggactctga

SEQ ID NO: 64453 - DNA, 20 bp, Homo sapiens
  source 1..20: mol_type = genomic DNA
agcactctggactctgaatc

SEQ ID NO: 64454 - DNA, 21 bp, Homo sapiens
  source 1..21: mol_type = genomic DNA
agcactctggactctgaatcc

SEQ ID NO: 64455 - DNA, 22 bp, Homo sapiens
  source 1..22: mol_type = genomic DNA
agcactctggactctgaatcca

SEQ ID NO: 64456 - DNA, 19 bp, Homo sapiens
  source 1..19: mol_type = genomic DNA
agcatgagactcttaatct

SEQ ID NO: 64457 - DNA, 18 bp, Homo sapiens
  source 1..18: mol_type = genomic DNA
agcatgggactcttaatc

SEQ ID NO: 64458 - DNA, 19 bp, Homo sapiens
  source 1..19: mol_type = genomic DNA
agcatgggactcttaatcc

SEQ ID NO: 64459 - DNA, 20 bp, Homo sapiens
  source 1..20: mol_type = genomic DNA
agcatgggactcttaatccc

SEQ ID NO: 64460 - DNA, 16 bp, Homo sapiens
  source 1..16: mol_type = genomic DNA
agcattaaccttttaa

SEQ ID NO: 64461 - DNA, 17 bp, Homo sapiens
  source 1..17: mol_type = genomic DNA
agcattaaccttttaag

SEQ ID NO: 64462 - DNA, 18 bp, Homo sapiens
  source 1..18: mol_type = genomic DNA
agcattaaccttttaagt

SEQ ID NO: 64463 - DNA, 19 bp, Homo sapiens
  source 1..19: mol_type = genomic DNA
agcattaaccttttaagtt

SEQ ID NO: 64464 - DNA, 20 bp, Homo sapiens
  source 1..20: mol_type = genomic DNA
agcattaaccttttaagtta

SEQ ID NO: 64465 - DNA, 18 bp, Homo sapiens
  source 1..18: mol_type = genomic DNA
agccagggattgtgggtt

SEQ ID NO: 64466 - DNA, 19 bp, Homo sapiens
  source 1..19: mol_type = genomic DNA
agccagggattgtgggttc

SEQ ID NO: 64467 - DNA, 20 bp, Homo sapiens
  source 1..20: mol_type = genomic DNA
agccagggattgtgggttcg

SEQ ID NO: 64468 - DNA, 19 bp, Homo sapiens
  source 1..19: mol_type = genomic DNA
agcccacccagggacgcca

SEQ ID NO: 64469 - DNA, 17 bp, Homo sapiens
  source 1..17: mol_type = genomic DNA
agcccggtaatcgcata

SEQ ID NO: 64470 - DNA, 17 bp, Homo sapiens
  source 1..17: mol_type = genomic DNA
agccctcagtaagttgc

SEQ ID NO: 64471 - DNA, 18 bp, Homo sapiens
  source 1..18: mol_type = genomic DNA
agccctcagtaagttgca

SEQ ID NO: 64472 - DNA, 19 bp, Homo sapiens
  source 1..19: mol_type = genomic DNA
agccgtgatcgtatagtgg

SEQ ID NO: 64473 - DNA, 21 bp, Homo sapiens
  source 1..21: mol_type = genomic DNA
agccgtgatcgtatagtggtt

SEQ ID NO: 64474 - DNA, 23 bp, Homo sapiens
  source 1..23: mol_type = genomic DNA
agccgtgatcgtatagtggttag

SEQ ID NO: 64475 - DNA, 24 bp, Homo sapiens
  source 1..24: mol_type = genomic DNA
agccgtgatcgtatagtggttagt

SEQ ID NO: 64476 - DNA, 18 bp, Homo sapiens
  source 1..18: mol_type = genomic DNA
agctaaataagctatcgg

SEQ ID NO: 64477 - DNA, 16 bp, Homo sapiens
  source 1..16: mol_type = genomic DNA
agctatccattggtct

SEQ ID NO: 64478 - DNA, 17 bp, Homo sapiens
  source 1..17: mol_type = genomic DNA
agctatcgggcccatac

SEQ ID NO: 64479 - DNA, 18 bp, Homo sapiens
  source 1..18: mol_type = genomic DNA
agctatcgggcccatacc

SEQ ID NO: 64480 - DNA, 19 bp, Homo sapiens
  source 1..19: mol_type = genomic DNA
agctatcgggcccataccc

SEQ ID NO: 64481 - DNA, 20 bp, Homo sapiens
  source 1..20: mol_type = genomic DNA
agctatcgggcccatacccc

SEQ ID NO: 64482 - DNA, 22 bp, Homo sapiens
  source 1..22: mol_type = genomic DNA
agctatcgggcccataccccga

SEQ ID NO: 64483 - DNA, 23 bp, Homo sapiens
  source 1..23: mol_type = genomic DNA
agctatcgggcccataccccgaa

SEQ ID NO: 64484 - DNA, 16 bp, Homo sapiens
  source 1..16: mol_type = genomic DNA
agctcacaagaactgc

SEQ ID NO: 64485 - DNA, 17 bp, Homo sapiens
  source 1..17: mol_type = genomic DNA
agctcacaagaactgct

SEQ ID NO: 64486 - DNA, 18 bp, Homo sapiens
  source 1..18: mol_type = genomic DNA
agctcacaagaactgcta

SEQ ID NO: 64487 - DNA, 19 bp, Homo sapiens
  source 1..19: mol_type = genomic DNA
agctcacaagaactgctaa

SEQ ID NO: 64488 - DNA, 20 bp, Homo sapiens
  source 1..20: mol_type = genomic DNA
agctcacaagaactgctaac

SEQ ID NO: 64489 - DNA, 21 bp, Homo sapiens
  source 1..21: mol_type = genomic DNA
agctcacaagaactgctaact

SEQ ID NO: 64490 - DNA, 22 bp, Homo sapiens
  source 1..22: mol_type = genomic DNA
agctcacaagaactgctaactc

SEQ ID NO: 64491 - DNA, 23 bp, Homo sapiens
  source 1..23: mol_type = genomic DNA
agctcacaagaactgctaactca

SEQ ID NO: 64492 - DNA, 24 bp, Homo sapiens
  source 1..24: mol_type = genomic DNA
agctcagtcggtagagcatgggac

SEQ ID NO: 64493 - DNA, 25 bp, Homo sapiens
  source 1..25: mol_type = genomic DNA
agctcagtcggtagagcatgggact

SEQ ID NO: 64494 - DNA, 16 bp, Homo sapiens
  source 1..16: mol_type = genomic DNA
agctccgaggtgattt

SEQ ID NO: 64495 - DNA, 17 bp, Homo sapiens
  source 1..17: mol_type = genomic DNA
agctccgaggtgatttt

SEQ ID NO: 64496 - DNA, 18 bp, Homo sapiens
  source 1..18: mol_type = genomic DNA
agctccgaggtgattttc

SEQ ID NO: 64497 - DNA, 19 bp, Homo sapiens
  source 1..19: mol_type = genomic DNA
agctccgaggtgattttca

SEQ ID NO: 64498 - DNA, 20 bp, Homo sapiens
  source 1..20: mol_type = genomic DNA
agctccgaggtgattttcat

SEQ ID NO: 64499 - DNA, 21 bp, Homo sapiens
  source 1..21: mol_type = genomic DNA
agctccgaggtgattttcata

SEQ ID NO: 64500 - DNA, 23 bp, Homo sapiens
  source 1..23: mol_type = genomic DNA
agctccgaggtgattttcatatt

SEQ ID NO: 64501 - DNA, 24 bp, Homo sapiens
  source 1..24: mol_type = genomic DNA
agctccgaggtgattttcatattg

SEQ ID NO: 64502 - DNA, 25 bp, Homo sapiens
  source 1..25: mol_type = genomic DNA
agctccgaggtgattttcatattga

SEQ ID NO: 64503 - DNA, 16 bp, Homo sapiens
  source 1..16: mol_type = genomic DNA
agcttaaaccccctta

SEQ ID NO: 64504 - DNA, 24 bp, Homo sapiens
  source 1..24: mol_type = genomic DNA
agcttaaacccccttatttctacc

SEQ ID NO: 64505 - DNA, 16 bp, Homo sapiens
  source 1..16: mol_type = genomic DNA
aggagatcctgggttc

SEQ ID NO: 64506 - DNA, 17 bp, Homo sapiens
  source 1..17: mol_type = genomic DNA
aggagatcctgggttcg

SEQ ID NO: 64507 - DNA, 16 bp, Homo sapiens
  source 1..16: mol_type = genomic DNA
aggagatttcaactta

SEQ ID NO: 64508 - DNA, 17 bp, Homo sapiens
  source 1..17: mol_type = genomic DNA
aggagatttcaacttaa

SEQ ID NO: 64509 - DNA, 18 bp, Homo sapiens
  source 1..18: mol_type = genomic DNA
aggagatttcaacttaac

SEQ ID NO: 64510 - DNA, 19 bp, Homo sapiens
  source 1..19: mol_type = genomic DNA
aggagatttcaacttaact

SEQ ID NO: 64511 - DNA, 24 bp, Homo sapiens
  source 1..24: mol_type = genomic DNA
aggagatttcaacttaacttgacc

SEQ ID NO: 64512 - DNA, 16 bp, Homo sapiens
  source 1..16: mol_type = genomic DNA
aggagcttaaaccccc

SEQ ID NO: 64513 - DNA, 19 bp, Homo sapiens
  source 1..19: mol_type = genomic DNA
aggagcttaaaccccctta

SEQ ID NO: 64514 - DNA, 21 bp, Homo sapiens
  source 1..21: mol_type = genomic DNA
aggatggccgagcggtctaag

SEQ ID NO: 64515 - DNA, 19 bp, Homo sapiens
  source 1..19: mol_type = genomic DNA
aggatggccgagtggtcta

SEQ ID NO: 64516 - DNA, 21 bp, Homo sapiens
  source 1..21: mol_type = genomic DNA
aggatggccgagtggtctaag

SEQ ID NO: 64517 - DNA, 16 bp, Homo sapiens
  source 1..16: mol_type = genomic DNA
aggattcggcgctctc

SEQ ID NO: 64518 - DNA, 19 bp, Homo sapiens
  source 1..19: mol_type = genomic DNA
aggcctctttttaccacca

SEQ ID NO: 64519 - DNA, 19 bp, Homo sapiens
  source 1..19: mol_type = genomic DNA
agggatgggttcgattctc

SEQ ID NO: 64520 - DNA, 16 bp, Homo sapiens
  source 1..16: mol_type = genomic DNA
agggattgtgggttcg

SEQ ID NO: 64521 - DNA, 22 bp, Homo sapiens
  source 1..22: mol_type = genomic DNA
agggattgtgggttcgagtccc

SEQ ID NO: 64522 - DNA, 20 bp, Homo sapiens
  source 1..20: mol_type = genomic DNA
agggccagtggcgcaatgga

SEQ ID NO: 64523 - DNA, 17 bp, Homo sapiens
  source 1..17: mol_type = genomic DNA
aggggtatgattctcgc

SEQ ID NO: 64524 - DNA, 18 bp, Homo sapiens
  source 1..18: mol_type = genomic DNA
aggggtatgattctcgct

SEQ ID NO: 64525 - DNA, 22 bp, Homo sapiens
  source 1..22: mol_type = genomic DNA
aggggtatgattctcgctttgg

SEQ ID NO: 64526 - DNA, 17 bp, Homo sapiens
  source 1..17: mol_type = genomic DNA
aggggtatgattctcgg

SEQ ID NO: 64527 - DNA, 18 bp, Homo sapiens
  source 1..18: mol_type = genomic DNA
aggggtatgattctcggt

SEQ ID NO: 64528 - DNA, 22 bp, Homo sapiens
  source 1..22: mol_type = genomic DNA
aggggtatgattctcggtttgg

SEQ ID NO: 64529 - DNA, 16 bp, Homo sapiens
  source 1..16: mol_type = genomic DNA
aggggtcgcgagttca

SEQ ID NO: 64530 - DNA, 25 bp, Homo sapiens
  source 1..25: mol_type = genomic DNA
agggtcgtgggttcgagccccacgt

SEQ ID NO: 64531 - DNA, 21 bp, Homo sapiens
  source 1..21: mol_type = genomic DNA
aggtcagctaaataagctatc

SEQ ID NO: 64532 - DNA, 24 bp, Homo sapiens
  source 1..24: mol_type = genomic DNA
aggtcagctaaataagctatcggg

SEQ ID NO: 64533 - DNA, 18 bp, Homo sapiens
  source 1..18: mol_type = genomic DNA
aggtcgcgggttcgatcc

SEQ ID NO: 64534 - DNA, 19 bp, Homo sapiens
  source 1..19: mol_type = genomic DNA
aggtcgcgggttcgatccc

SEQ ID NO: 64535 - DNA, 23 bp, Homo sapiens
  source 1..23: mol_type = genomic DNA
aggtcgcgggttcgatccccgta

SEQ ID NO: 64536 - DNA, 19 bp, Homo sapiens
  source 1..19: mol_type = genomic DNA
aggtgattttcatattgaa

SEQ ID NO: 64537 - DNA, 20 bp, Homo sapiens
  source 1..20: mol_type = genomic DNA
aggtgattttcatattgaat

SEQ ID NO: 64538 - DNA, 21 bp, Homo sapiens
  source 1..21: mol_type = genomic DNA
aggtgattttcatattgaatt

SEQ ID NO: 64539 - DNA, 19 bp, Homo sapiens
  source 1..19: mol_type = genomic DNA
aggtggcacggagaatttt

SEQ ID NO: 64540 - DNA, 23 bp, Homo sapiens
  source 1..23: mol_type = genomic DNA
aggttccgggttcgagtcccggc

SEQ ID NO: 64541 - DNA, 16 bp, Homo sapiens
  source 1..16: mol_type = genomic DNA
aggttcgactcctggc

SEQ ID NO: 64542 - DNA, 20 bp, Homo sapiens
  source 1..20: mol_type = genomic DNA
aggttcgactcctggctggc

SEQ ID NO: 64543 - DNA, 16 bp, Homo sapiens
  source 1..16: mol_type = genomic DNA
aggttcgagtcctgcc

SEQ ID NO: 64544 - DNA, 23 bp, Homo sapiens
  source 1..23: mol_type = genomic DNA
aggttgtgggttcgagtcccacc

SEQ ID NO: 64545 - DNA, 16 bp, Homo sapiens
  source 1..16: mol_type = genomic DNA
agtaaataataggagc

SEQ ID NO: 64546 - DNA, 19 bp, Homo sapiens
  source 1..19: mol_type = genomic DNA
agtaaataataggagctta

SEQ ID NO: 64547 - DNA, 20 bp, Homo sapiens
  source 1..20: mol_type = genomic DNA
agtaaataataggagcttaa

SEQ ID NO: 64548 - DNA, 22 bp, Homo sapiens
  source 1..22: mol_type = genomic DNA
agtaaataataggagcttaaac

SEQ ID NO: 64549 - DNA, 16 bp, Homo sapiens
  source 1..16: mol_type = genomic DNA
agtaaggtcagctaaa

SEQ ID NO: 64550 - DNA, 17 bp, Homo sapiens
  source 1..17: mol_type = genomic DNA
agtaaggtcagctaaat

SEQ ID NO: 64551 - DNA, 18 bp, Homo sapiens
  source 1..18: mol_type = genomic DNA
agtaaggtcagctaaata

SEQ ID NO: 64552 - DNA, 19 bp, Homo sapiens
  source 1..19: mol_type = genomic DNA
agtaaggtcagctaaataa

SEQ ID NO: 64553 - DNA, 20 bp, Homo sapiens
  source 1..20: mol_type = genomic DNA
agtaaggtcagctaaataag

SEQ ID NO: 64554 - DNA, 21 bp, Homo sapiens
  source 1..21: mol_type = genomic DNA
agtaaggtcagctaaataagc

SEQ ID NO: 64555 - DNA, 22 bp, Homo sapiens
  source 1..22: mol_type = genomic DNA
agtaaggtcagctaaataagct

SEQ ID NO: 64556 - DNA, 25 bp, Homo sapiens
  source 1..25: mol_type = genomic DNA
agtaaggtcagctaaataagctatc

SEQ ID NO: 64557 - DNA, 16 bp, Homo sapiens
  source 1..16: mol_type = genomic DNA
agtaccgttaacttcc

SEQ ID NO: 64558 - DNA, 16 bp, Homo sapiens
  source 1..16: mol_type = genomic DNA
agtactctgcgttgtg

SEQ ID NO: 64559 - DNA, 17 bp, Homo sapiens
  source 1..17: mol_type = genomic DNA
agtactctgcgttgtgg

SEQ ID NO: 64560 - DNA, 18 bp, Homo sapiens
  source 1..18: mol_type = genomic DNA
agtactctgcgttgtggc

SEQ ID NO: 64561 - DNA, 18 bp, Homo sapiens
  source 1..18: mol_type = genomic DNA
agtcagaggttcaattcc

SEQ ID NO: 64562 - DNA, 20 bp, Homo sapiens
  source 1..20: mol_type = genomic DNA
agtcagaggttcaattcctc

SEQ ID NO: 64563 - DNA, 18 bp, Homo sapiens
  source 1..18: mol_type = genomic DNA
agtcccacccggggtacc

SEQ ID NO: 64564 - DNA, 18 bp, Homo sapiens
  source 1..18: mol_type = genomic DNA
agtcccattggtctagcc

SEQ ID NO: 64565 - DNA, 19 bp, Homo sapiens
  source 1..19: mol_type = genomic DNA
agtcccattggtctagcca

SEQ ID NO: 64566 - DNA, 18 bp, Homo sapiens
  source 1..18: mol_type = genomic DNA
agtccctgttcgggcgcc

SEQ ID NO: 64567 - DNA, 16 bp, Homo sapiens
  source 1..16: mol_type = genomic DNA
agtccgtgcgagaata

SEQ ID NO: 64568 - DNA, 17 bp, Homo sapiens
  source 1..17: mol_type = genomic DNA
agtccgtgcgagaatac

SEQ ID NO: 64569 - DNA, 18 bp, Homo sapiens
  source 1..18: mol_type = genomic DNA
agtccgtgcgagaatacc

SEQ ID NO: 64570 - DNA, 19 bp, Homo sapiens
  source 1..19: mol_type = genomic DNA
agtccgtgcgagaatacca

SEQ ID NO: 64571 - DNA, 16 bp, Homo sapiens
  source 1..16: mol_type = genomic DNA
agtcggtagagcatca

SEQ ID NO: 64572 - DNA, 17 bp, Homo sapiens
  source 1..17: mol_type = genomic DNA
agtcggtagagcatcag

SEQ ID NO: 64573 - DNA, 18 bp, Homo sapiens
  source 1..18: mol_type = genomic DNA
agtcggtagagcatcaga

SEQ ID NO: 64574 - DNA, 19 bp, Homo sapiens
  source 1..19: mol_type = genomic DNA
agtcggtagagcatcagac

SEQ ID NO: 64575 - DNA, 20 bp, Homo sapiens
  source 1..20: mol_type = genomic DNA
agtcggtagagcatcagact

SEQ ID NO: 64576 - DNA, 16 bp, Homo sapiens
  source 1..16: mol_type = genomic DNA
agtcggtagagcatga

SEQ ID NO: 64577 - DNA, 17 bp, Homo sapiens
  source 1..17: mol_type = genomic DNA
agtcggtagagcatgag

SEQ ID NO: 64578 - DNA, 18 bp, Homo sapiens
  source 1..18: mol_type = genomic DNA
agtcggtagagcatgaga

SEQ ID NO: 64579 - DNA, 19 bp, Homo sapiens
  source 1..19: mol_type = genomic DNA
agtcggtagagcatgagac

SEQ ID NO: 64580 - DNA, 20 bp, Homo sapiens
  source 1..20: mol_type = genomic DNA
agtcggtagagcatgagact

SEQ ID NO: 64581 - DNA, 21 bp, Homo sapiens
  source 1..21: mol_type = genomic DNA
agtcggtagagcatgagactc

SEQ ID NO: 64582 - DNA, 22 bp, Homo sapiens
  source 1..22: mol_type = genomic DNA
agtcggtagagcatgagactct

SEQ ID NO: 64583 - DNA, 23 bp, Homo sapiens
  source 1..23: mol_type = genomic DNA
agtcggtagagcatgagactctt

SEQ ID NO: 64584 - DNA, 16 bp, Homo sapiens
  source 1..16: mol_type = genomic DNA
agtcggtagagcatgg

SEQ ID NO: 64585 - DNA, 17 bp, Homo sapiens
  source 1..17: mol_type = genomic DNA
agtcggtagagcatggg

SEQ ID NO: 64586 - DNA, 18 bp, Homo sapiens
  source 1..18: mol_type = genomic DNA
agtcggtagagcatggga

SEQ ID NO: 64587 - DNA, 19 bp, Homo sapiens
  source 1..19: mol_type = genomic DNA
agtcggtagagcatgggac

SEQ ID NO: 64588 - DNA, 20 bp, Homo sapiens
  source 1..20: mol_type = genomic DNA
agtcggtagagcatgggact

SEQ ID NO: 64589 - DNA, 21 bp, Homo sapiens
  source 1..21: mol_type = genomic DNA
agtcggtagagcatgggactc

SEQ ID NO: 64590 - DNA, 22 bp, Homo sapiens
  source 1..22: mol_type = genomic DNA
agtcggtagagcatgggactct

SEQ ID NO: 64591 - DNA, 22 bp, Homo sapiens
  source 1..22: mol_type = genomic DNA
agtctcataatctgaaggtcgt

SEQ ID NO: 64592 - DNA, 19 bp, Homo sapiens
  source 1..19: mol_type = genomic DNA
agtctcttcgggggcgtgg

SEQ ID NO: 64593 - DNA, 23 bp, Homo sapiens
  source 1..23: mol_type = genomic DNA
agtctcttcgggggcgtgggttc

SEQ ID NO: 64594 - DNA, 18 bp, Homo sapiens
  source 1..18: mol_type = genomic DNA
agtgaagcattggactgt

SEQ ID NO: 64595 - DNA, 19 bp, Homo sapiens
  source 1..19: mol_type = genomic DNA
agtgaagcattggactgta

SEQ ID NO: 64596 - DNA, 18 bp, Homo sapiens
  source 1..18: mol_type = genomic DNA
agtggcgcagcggaagcg

SEQ ID NO: 64597 - DNA, 19 bp, Homo sapiens
  source 1..19: mol_type = genomic DNA
agtggcgcagcggaagcgt

SEQ ID NO: 64598 - DNA, 22 bp, Homo sapiens
  source 1..22: mol_type = genomic DNA
agtggcgcagcggaagcgtgct

SEQ ID NO: 64599 - DNA, 18 bp, Homo sapiens
  source 1..18: mol_type = genomic DNA
agtggctgatttgcgttc

SEQ ID NO: 64600 - DNA, 17 bp, Homo sapiens
  source 1..17: mol_type = genomic DNA
agtggtagaattctcgc

SEQ ID NO: 64601 - DNA, 18 bp, Homo sapiens
  source 1..18: mol_type = genomic DNA
agtggtagaattctcgcc

SEQ ID NO: 64602 - DNA, 19 bp, Homo sapiens
  source 1..19: mol_type = genomic DNA
agtggtagaattctcgcct

SEQ ID NO: 64603 - DNA, 20 bp, Homo sapiens
  source 1..20: mol_type = genomic DNA
agtggtagaattctcgcctg

SEQ ID NO: 64604 - DNA, 21 bp, Homo sapiens
  source 1..21: mol_type = genomic DNA
agtggtagaattctcgcctgc

SEQ ID NO: 64605 - DNA, 22 bp, Homo sapiens
  source 1..22: mol_type = genomic DNA
agtggtagaattctcgcctgcc

SEQ ID NO: 64606 - DNA, 17 bp, Homo sapiens
  source 1..17: mol_type = genomic DNA
agtggtagagcatttga

SEQ ID NO: 64607 - DNA, 19 bp, Homo sapiens
  source 1..19: mol_type = genomic DNA
agtggtagagcatttgact

SEQ ID NO: 64608 - DNA, 21 bp, Homo sapiens
  source 1..21: mol_type = genomic DNA
agtggtagagcatttgactgc

SEQ ID NO: 64609 - DNA, 17 bp, Homo sapiens
  source 1..17: mol_type = genomic DNA
agtggttaggattcggc

SEQ ID NO: 64610 - DNA, 18 bp, Homo sapiens
  source 1..18: mol_type = genomic DNA
agtggttaggattcggcg

SEQ ID NO: 64611 - DNA, 19 bp, Homo sapiens
  source 1..19: mol_type = genomic DNA
agtggttaggattcggcgc

SEQ ID NO: 64612 - DNA, 20 bp, Homo sapiens
  source 1..20: mol_type = genomic DNA
agtggttaggattcggcgct

SEQ ID NO: 64613 - DNA, 21 bp, Homo sapiens
  source 1..21: mol_type = genomic DNA
agtggttaggattcggcgctc

SEQ ID NO: 64614 - DNA, 17 bp, Homo sapiens
  source 1..17: mol_type = genomic DNA
agtggttagtactctgc

SEQ ID NO: 64615 - DNA, 18 bp, Homo sapiens
  source 1..18: mol_type = genomic DNA
agtggttagtactctgcg

SEQ ID NO: 64616 - DNA, 20 bp, Homo sapiens
  source 1..20: mol_type = genomic DNA
agtggttagtactctgcgtt

SEQ ID NO: 64617 - DNA, 21 bp, Homo sapiens
  source 1..21: mol_type = genomic DNA
agtggttagtactctgcgttg

SEQ ID NO: 64618 - DNA, 20 bp, Homo sapiens
  source 1..20: mol_type = genomic DNA
agttaaagactttttctctg

SEQ ID NO: 64619 - DNA, 21 bp, Homo sapiens
  source 1..21: mol_type = genomic DNA
agttaaagactttttctctga

SEQ ID NO: 64620 - DNA, 22 bp, Homo sapiens
  source 1..22: mol_type = genomic DNA
agttaaagactttttctctgac

SEQ ID NO: 64621 - DNA, 23 bp, Homo sapiens
  source 1..23: mol_type = genomic DNA
agttaaagactttttctctgacc

SEQ ID NO: 64622 - DNA, 17 bp, Homo sapiens
  source 1..17: mol_type = genomic DNA
agttaaagattaagaga

SEQ ID NO: 64623 - DNA, 18 bp, Homo sapiens
  source 1..18: mol_type = genomic DNA
agttaaagattaagagaa

SEQ ID NO: 64624 - DNA, 19 bp, Homo sapiens
  source 1..19: mol_type = genomic DNA
agttaaagattaagagaac

SEQ ID NO: 64625 - DNA, 20 bp, Homo sapiens
  source 1..20: mol_type = genomic DNA
agttaaagattaagagaacc

SEQ ID NO: 64626 - DNA, 21 bp, Homo sapiens
  source 1..21: mol_type = genomic DNA
agttaaagattaagagaacca

SEQ ID NO: 64627 - DNA, 21 bp, Homo sapiens
  source 1..21: mol_type = genomic DNA
agttcaaatctcgctggggcc

SEQ ID NO: 64628 - DNA, 18 bp, Homo sapiens
  source 1..18: mol_type = genomic DNA
agttcaaatctcggtgga

SEQ ID NO: 64629 - DNA, 19 bp, Homo sapiens
  source 1..19: mol_type = genomic DNA
agttcaaatctcggtggaa

SEQ ID NO: 64630 - DNA, 20 bp, Homo sapiens
  source 1..20: mol_type = genomic DNA
agttcaaatctcggtggaac

SEQ ID NO: 64631 - DNA, 21 bp, Homo sapiens
  source 1..21: mol_type = genomic DNA
agttcaaatctcggtggaacc

SEQ ID NO: 64632 - DNA, 20 bp, Homo sapiens
  source 1..20: mol_type = genomic DNA
agttcaaatctcggtgggac

SEQ ID NO: 64633 - DNA, 16 bp, Homo sapiens
  source 1..16: mol_type = genomic DNA
agttctggtctccgga

SEQ ID NO: 64634 - DNA, 16 bp, Homo sapiens
  source 1..16: mol_type = genomic DNA
agttgacccgggttcg

SEQ ID NO: 64635 - DNA, 19 bp, Homo sapiens
  source 1..19: mol_type = genomic DNA
agttgcaatacttaatttc

SEQ ID NO: 64636 - DNA, 22 bp, Homo sapiens
  source 1..22: mol_type = genomic DNA
agttgcaatacttaatttctgc

SEQ ID NO: 64637 - DNA, 23 bp, Homo sapiens
  source 1..23: mol_type = genomic DNA
agttgcaatacttaatttctgcc

SEQ ID NO: 64638 - DNA, 24 bp, Homo sapiens
  source 1..24: mol_type = genomic DNA
agttgcaatacttaatttctgcca

SEQ ID NO: 64639 - DNA, 20 bp, Homo sapiens
  source 1..20: mol_type = genomic DNA
agtttaaccaaaacatcaga

SEQ ID NO: 64640 - DNA, 24 bp, Homo sapiens
  source 1..24: mol_type = genomic DNA
agttttgacaacattcaaaaaaga

SEQ ID NO: 64641 - DNA, 20 bp, Homo sapiens
  source 1..20: mol_type = genomic DNA
ataacagctatccattggtc

SEQ ID NO: 64642 - DNA, 21 bp, Homo sapiens
  source 1..21: mol_type = genomic DNA
ataacagctatccattggtct

SEQ ID NO: 64643 - DNA, 16 bp, Homo sapiens
  source 1..16: mol_type = genomic DNA
ataacccagaggtcga

SEQ ID NO: 64644 - DNA, 19 bp, Homo sapiens
  source 1..19: mol_type = genomic DNA
ataacccagaggtcgatgg

SEQ ID NO: 64645 - DNA, 20 bp, Homo sapiens
  source 1..20: mol_type = genomic DNA
ataacccagaggtcgatgga

SEQ ID NO: 64646 - DNA, 21 bp, Homo sapiens
  source 1..21: mol_type = genomic DNA
ataacccagaggtcgatggat

SEQ ID NO: 64647 - DNA, 23 bp, Homo sapiens
  source 1..23: mol_type = genomic DNA
ataacccagaggtcgatggatcg

SEQ ID NO: 64648 - DNA, 16 bp, Homo sapiens
  source 1..16: mol_type = genomic DNA
ataagctatcgggccc

SEQ ID NO: 64649 - DNA, 17 bp, Homo sapiens
  source 1..17: mol_type = genomic DNA
ataagctatcgggccca

SEQ ID NO: 64650 - DNA, 18 bp, Homo sapiens
  source 1..18: mol_type = genomic DNA
ataagctatcgggcccat

SEQ ID NO: 64651 - DNA, 17 bp, Homo sapiens
  source 1..17: mol_type = genomic DNA
ataataggagcttaaac

SEQ ID NO: 64652 - DNA, 18 bp, Homo sapiens
  source 1..18: mol_type = genomic DNA
ataataggagcttaaacc

SEQ ID NO: 64653 - DNA, 19 bp, Homo sapiens
  source 1..19: mol_type = genomic DNA
ataataggagcttaaaccc

SEQ ID NO: 64654 - DNA, 20 bp, Homo sapiens
  source 1..20: mol_type = genomic DNA
ataataggagcttaaacccc

SEQ ID NO: 64655 - DNA, 21 bp, Homo sapiens
  source 1..21: mol_type = genomic DNA
ataataggagcttaaaccccc

SEQ ID NO: 64656 - DNA, 19 bp, Homo sapiens
  source 1..19: mol_type = genomic DNA
ataatcatatttaccaacc

SEQ ID NO: 64657 - DNA, 20 bp, Homo sapiens
  source 1..20: mol_type = genomic DNA
ataatcatatttaccaacca

SEQ ID NO: 64658 - DNA, 19 bp, Homo sapiens
  source 1..19: mol_type = genomic DNA
atacagaccaagagccttc

SEQ ID NO: 64659 - DNA, 20 bp, Homo sapiens
  source 1..20: mol_type = genomic DNA
atacagaccaagagccttca

SEQ ID NO: 64660 - DNA, 19 bp, Homo sapiens
  source 1..19: mol_type = genomic DNA
atacccttcccgtactacc

SEQ ID NO: 64661 - DNA, 20 bp, Homo sapiens
  source 1..20: mol_type = genomic DNA
atacccttcccgtactacca

SEQ ID NO: 64662 - DNA, 16 bp, Homo sapiens
  source 1..16: mol_type = genomic DNA
atacttaatttctgcc

SEQ ID NO: 64663 - DNA, 17 bp, Homo sapiens
  source 1..17: mol_type = genomic DNA
atacttaatttctgcca

SEQ ID NO: 64664 - DNA, 18 bp, Homo sapiens
  source 1..18: mol_type = genomic DNA
atagagtaaataatagga

SEQ ID NO: 64665 - DNA, 19 bp, Homo sapiens
  source 1..19: mol_type = genomic DNA
atagagtaaataataggag

SEQ ID NO: 64666 - DNA, 20 bp, Homo sapiens
  source 1..20: mol_type = genomic DNA
atagagtaaataataggagc

SEQ ID NO: 64667 - DNA, 16 bp, Homo sapiens
  source 1..16: mol_type = genomic DNA
ataggagcttaaaccc

SEQ ID NO: 64668 - DNA, 17 bp, Homo sapiens
  source 1..17: mol_type = genomic DNA
ataggagcttaaacccc

SEQ ID NO: 64669 - DNA, 18 bp, Homo sapiens
  source 1..18: mol_type = genomic DNA
atagtaccgttaacttcc

SEQ ID NO: 64670 - DNA, 19 bp, Homo sapiens
  source 1..19: mol_type = genomic DNA
atagtggttagtactctgc

SEQ ID NO: 64671 - DNA, 22 bp, Homo sapiens
  source 1..22: mol_type = genomic DNA
atagtttaaccaaaacatcaga

SEQ ID NO: 64672 - DNA, 19 bp, Homo sapiens
  source 1..19: mol_type = genomic DNA
atatcattggtcgtggttg

SEQ ID NO: 64673 - DNA, 20 bp, Homo sapiens
  source 1..20: mol_type = genomic DNA
atatcattggtcgtggttgt

SEQ ID NO: 64674 - DNA, 21 bp, Homo sapiens
  source 1..21: mol_type = genomic DNA
atatcattggtcgtggttgta

SEQ ID NO: 64675 - DNA, 22 bp, Homo sapiens
  source 1..22: mol_type = genomic DNA
atatcattggtcgtggttgtag

SEQ ID NO: 64676 - DNA, 24 bp, Homo sapiens
  source 1..24: mol_type = genomic DNA
atatcattggtcgtggttgtagtc

SEQ ID NO: 64677 - DNA, 25 bp, Homo sapiens
  source 1..25: mol_type = genomic DNA
atatcattggtcgtggttgtagtcc

SEQ ID NO: 64678 - DNA, 16 bp, Homo sapiens
  source 1..16: mol_type = genomic DNA
atatgtccgcgtgggt

SEQ ID NO: 64679 - DNA, 17 bp, Homo sapiens
  source 1..17: mol_type = genomic DNA
atatgtccgcgtgggtt

SEQ ID NO: 64680 - DNA, 16 bp, Homo sapiens
  source 1..16: mol_type = genomic DNA
atcaccccataaacac

SEQ ID NO: 64681 - DNA, 17 bp, Homo sapiens
  source 1..17: mol_type = genomic DNA
atcaccccataaacacc

SEQ ID NO: 64682 - DNA, 18 bp, Homo sapiens
  source 1..18: mol_type = genomic DNA
atcaccccataaacacca

SEQ ID NO: 64683 - DNA, 17 bp, Homo sapiens
  source 1..17: mol_type = genomic DNA
atcacgtcggggtcacc

SEQ ID NO: 64684 - DNA, 18 bp, Homo sapiens
  source 1..18: mol_type = genomic DNA
atcacgtcggggtcacca

SEQ ID NO: 64685 - DNA, 19 bp, Homo sapiens
  source 1..19: mol_type = genomic DNA
atcagattgtgaatctgac

SEQ ID NO: 64686 - DNA, 20 bp, Homo sapiens
  source 1..20: mol_type = genomic DNA
atcagattgtgaatctgaca

SEQ ID NO: 64687 - DNA, 16 bp, Homo sapiens
  source 1..16: mol_type = genomic DNA
atcatatttaccaacc

SEQ ID NO: 64688 - DNA, 17 bp, Homo sapiens
  source 1..17: mol_type = genomic DNA
atcatatttaccaacca

SEQ ID NO: 64689 - DNA, 19 bp, Homo sapiens
  source 1..19: mol_type = genomic DNA
atcattggtcgtggttgta

SEQ ID NO: 64690 - DNA, 22 bp, Homo sapiens
  source 1..22: mol_type = genomic DNA
atcattggtcgtggttgtagtc

SEQ ID NO: 64691 - DNA, 18 bp, Homo sapiens
  source 1..18: mol_type = genomic DNA
atccagcgatccgagttc

SEQ ID NO: 64692 - DNA, 19 bp, Homo sapiens
  source 1..19: mol_type = genomic DNA
atccagcgatccgagttca

SEQ ID NO: 64693 - DNA, 17 bp, Homo sapiens
  source 1..17: mol_type = genomic DNA
atccattggtcttaggc

SEQ ID NO: 64694 - DNA, 18 bp, Homo sapiens
  source 1..18: mol_type = genomic DNA
atccattggtcttaggcc

SEQ ID NO: 64695 - DNA, 19 bp, Homo sapiens
  source 1..19: mol_type = genomic DNA
atccattggtcttaggccc

SEQ ID NO: 64696 - DNA, 20 bp, Homo sapiens
  source 1..20: mol_type = genomic DNA
atccattggtcttaggcccc

SEQ ID NO: 64697 - DNA, 21 bp, Homo sapiens
  source 1..21: mol_type = genomic DNA
atccattggtcttaggcccca

SEQ ID NO: 64698 - DNA, 22 bp, Homo sapiens
  source 1..22: mol_type = genomic DNA
atccattggtcttaggccccaa

SEQ ID NO: 64699 - DNA, 16 bp, Homo sapiens
  source 1..16: mol_type = genomic DNA
atcccaccgctgccac

SEQ ID NO: 64700 - DNA, 17 bp, Homo sapiens
  source 1..17: mol_type = genomic DNA
atcccaccgctgccacc

SEQ ID NO: 64701 - DNA, 18 bp, Homo sapiens
  source 1..18: mol_type = genomic DNA
atcccaccgctgccacca

SEQ ID NO: 64702 - DNA, 17 bp, Homo sapiens
  source 1..17: mol_type = genomic DNA
atcccactcctgacacc

SEQ ID NO: 64703 - DNA, 18 bp, Homo sapiens
  source 1..18: mol_type = genomic DNA
atcccactcctgacacca

SEQ ID NO: 64704 - DNA, 17 bp, Homo sapiens
  source 1..17: mol_type = genomic DNA
atcccacttctgacacc

SEQ ID NO: 64705 - DNA, 18 bp, Homo sapiens
  source 1..18: mol_type = genomic DNA
atcccacttctgacacca

SEQ ID NO: 64706 - DNA, 17 bp, Homo sapiens
  source 1..17: mol_type = genomic DNA
atcccagcggggcctcc

SEQ ID NO: 64707 - DNA, 18 bp, Homo sapiens
  source 1..18: mol_type = genomic DNA
atcccagcggggcctcca

SEQ ID NO: 64708 - DNA, 16 bp, Homo sapiens
  source 1..16: mol_type = genomic DNA
atcccagcggtgcctc

SEQ ID NO: 64709 - DNA, 17 bp, Homo sapiens
  source 1..17: mol_type = genomic DNA
atcccagcggtgcctcc

SEQ ID NO: 64710 - DNA, 18 bp, Homo sapiens
  source 1..18: mol_type = genomic DNA
atcccagcggtgcctcca

SEQ ID NO: 64711 - DNA, 18 bp, Homo sapiens
  source 1..18: mol_type = genomic DNA
atcccagtagagcctcca

SEQ ID NO: 64712 - DNA, 17 bp, Homo sapiens
  source 1..17: mol_type = genomic DNA
atcccatcctcgtcgcc

SEQ ID NO: 64713 - DNA, 18 bp, Homo sapiens
  source 1..18: mol_type = genomic DNA
atcccatcctcgtcgcca

SEQ ID NO: 64714 - DNA, 19 bp, Homo sapiens
  source 1..19: mol_type = genomic DNA
atccccggcacctccacca

SEQ ID NO: 64715 - DNA, 19 bp, Homo sapiens
  source 1..19: mol_type = genomic DNA
atccccggcatctccacca

SEQ ID NO: 64716 - DNA, 18 bp, Homo sapiens
  source 1..18: mol_type = genomic DNA
atccccgtacgggccacc

SEQ ID NO: 64717 - DNA, 19 bp, Homo sapiens
  source 1..19: mol_type = genomic DNA
atccccgtacgggccacca

SEQ ID NO: 64718 - DNA, 16 bp, Homo sapiens
  source 1..16: mol_type = genomic DNA
atcccggacgagcccc

SEQ ID NO: 64719 - DNA, 17 bp, Homo sapiens
  source 1..17: mol_type = genomic DNA
atcccggacgagccccc

SEQ ID NO: 64720 - DNA, 18 bp, Homo sapiens
  source 1..18: mol_type = genomic DNA
atcccggacgagccccca

SEQ ID NO: 64721 - DNA, 19 bp, Homo sapiens
  source 1..19: mol_type = genomic DNA
atcccgggtttcggcacca

SEQ ID NO: 64722 - DNA, 18 bp, Homo sapiens
  source 1..18: mol_type = genomic DNA
atccctccgtggttacca

SEQ ID NO: 64723 - DNA, 16 bp, Homo sapiens
  source 1..16: mol_type = genomic DNA
atccgagtcacggcac

SEQ ID NO: 64724 - DNA, 17 bp, Homo sapiens
  source 1..17: mol_type = genomic DNA
atccgagtcacggcacc

SEQ ID NO: 64725 - DNA, 18 bp, Homo sapiens
  source 1..18: mol_type = genomic DNA
atccgagtcacggcacca

SEQ ID NO: 64726 - DNA, 17 bp, Homo sapiens
  source 1..17: mol_type = genomic DNA
atccggctcgaaggacc

SEQ ID NO: 64727 - DNA, 18 bp, Homo sapiens
  source 1..18: mol_type = genomic DNA
atccggctcgaaggacca

SEQ ID NO: 64728 - DNA, 17 bp, Homo sapiens
  source 1..17: mol_type = genomic DNA
atccggctcggaggacc

SEQ ID NO: 64729 - DNA, 18 bp, Homo sapiens
  source 1..18: mol_type = genomic DNA
atccggctcggaggacca

SEQ ID NO: 64730 - DNA, 16 bp, Homo sapiens
  source 1..16: mol_type = genomic DNA
atccgggtgccccctc

SEQ ID NO: 64731 - DNA, 17 bp, Homo sapiens
  source 1..17: mol_type = genomic DNA
atccgggtgccccctcc

SEQ ID NO: 64732 - DNA, 18 bp, Homo sapiens
  source 1..18: mol_type = genomic DNA
atccgggtgccccctcca

SEQ ID NO: 64733 - DNA, 18 bp, Homo sapiens
  source 1..18: mol_type = genomic DNA
atcctatatatcttacca

SEQ ID NO: 64734 - DNA, 17 bp, Homo sapiens
  source 1..17: mol_type = genomic DNA
atcctgccgactacgcc

SEQ ID NO: 64735 - DNA, 18 bp, Homo sapiens
  source 1..18: mol_type = genomic DNA
atcctgccgactacgcca

SEQ ID NO: 64736 - DNA, 18 bp, Homo sapiens
  source 1..18: mol_type = genomic DNA
atcctgctcacagcgcca

SEQ ID NO: 64737 - DNA, 17 bp, Homo sapiens
  source 1..17: mol_type = genomic DNA
atcctgttcgtgacgcc

SEQ ID NO: 64738 - DNA, 18 bp, Homo sapiens
  source 1..18: mol_type = genomic DNA
atcctgttcgtgacgcca

SEQ ID NO: 64739 - DNA, 18 bp, Homo sapiens
  source 1..18: mol_type = genomic DNA
atcgggcccataccccga

SEQ ID NO: 64740 - DNA, 20 bp, Homo sapiens
  source 1..20: mol_type = genomic DNA
atctaaaggtccctggttcg

SEQ ID NO: 64741 - DNA, 21 bp, Homo sapiens
  source 1..21: mol_type = genomic DNA
atctaaaggtccctggttcga

SEQ ID NO: 64742 - DNA, 22 bp, Homo sapiens
  source 1..22: mol_type = genomic DNA
atctaaaggtccctggttcgat

SEQ ID NO: 64743 - DNA, 23 bp, Homo sapiens
  source 1..23: mol_type = genomic DNA
atctaaaggtccctggttcgatc

SEQ ID NO: 64744 - DNA, 19 bp, Homo sapiens
  source 1..19: mol_type = genomic DNA
atctcagggtcgtgggttc

SEQ ID NO: 64745 - DNA, 16 bp, Homo sapiens
  source 1..16: mol_type = genomic DNA
atctcgctggggcctc

SEQ ID NO: 64746 - DNA, 17 bp, Homo sapiens
  source 1..17: mol_type = genomic DNA
atctcgctggggcctcc

SEQ ID NO: 64747 - DNA, 18 bp, Homo sapiens
  source 1..18: mol_type = genomic DNA
atctcgctggggcctcca

SEQ ID NO: 64748 - DNA, 16 bp, Homo sapiens
  source 1..16: mol_type = genomic DNA
atctcggtggaacctc

SEQ ID NO: 64749 - DNA, 17 bp, Homo sapiens
  source 1..17: mol_type = genomic DNA
atctcggtggaacctcc

SEQ ID NO: 64750 - DNA, 18 bp, Homo sapiens
  source 1..18: mol_type = genomic DNA
atctcggtggaacctcca

SEQ ID NO: 64751 - DNA, 16 bp, Homo sapiens
  source 1..16: mol_type = genomic DNA
atctcggtgggacctc

SEQ ID NO: 64752 - DNA, 17 bp, Homo sapiens
  source 1..17: mol_type = genomic DNA
atctcggtgggacctcc

SEQ ID NO: 64753 - DNA, 18 bp, Homo sapiens
  source 1..18: mol_type = genomic DNA
atctcggtgggacctcca

SEQ ID NO: 64754 - DNA, 17 bp, Homo sapiens
  source 1..17: mol_type = genomic DNA
atctgacaacagaggct

SEQ ID NO: 64755 - DNA, 20 bp, Homo sapiens
  source 1..20: mol_type = genomic DNA
atctgacaacagaggcttac

SEQ ID NO: 64756 - DNA, 18 bp, Homo sapiens
  source 1..18: mol_type = genomic DNA
atctgagggtccagggtt

SEQ ID NO: 64757 - DNA, 20 bp, Homo sapiens
  source 1..20: mol_type = genomic DNA
atgaaaacctttttccaagg

SEQ ID NO: 64758 - DNA, 17 bp, Homo sapiens
  source 1..17: mol_type = genomic DNA
atgagactcttaatctc

SEQ ID NO: 64759 - DNA, 19 bp, Homo sapiens
  source 1..19: mol_type = genomic DNA
atgataatcatatttacca

SEQ ID NO: 64760 - DNA, 20 bp, Homo sapiens
  source 1..20: mol_type = genomic DNA
atgataatcatatttaccaa

SEQ ID NO: 64761 - DNA, 21 bp, Homo sapiens
  source 1..21: mol_type = genomic DNA
atgataatcatatttaccaac

SEQ ID NO: 64762 - DNA, 22 bp, Homo sapiens
  source 1..22: mol_type = genomic DNA
atgataatcatatttaccaacc

SEQ ID NO: 64763 - DNA, 23 bp, Homo sapiens
  source 1..23: mol_type = genomic DNA
atgataatcatatttaccaacca

SEQ ID NO: 64764 - DNA, 23 bp, Homo sapiens
  source 1..23: mol_type = genomic DNA
atgattctcgcttcgggtgcgag

SEQ ID NO: 64765 - DNA, 24 bp, Homo sapiens
  source 1..24: mol_type = genomic DNA
atgattctcggtttgggtccgaga

SEQ ID NO: 64766 - DNA, 17 bp, Homo sapiens
  source 1..17: mol_type = genomic DNA
atgcccccatgtctaac

SEQ ID NO: 64767 - DNA, 18 bp, Homo sapiens
  source 1..18: mol_type = genomic DNA
atgcccccatgtctaaca

SEQ ID NO: 64768 - DNA, 21 bp, Homo sapiens
  source 1..21: mol_type = genomic DNA
atgcccccatgtctaacaaca

SEQ ID NO: 64769 - DNA, 25 bp, Homo sapiens
  source 1..25: mol_type = genomic DNA
atgcccccatgtctaacaacatggc

SEQ ID NO: 64770 - DNA, 17 bp, Homo sapiens
  source 1..17: mol_type = genomic DNA
atggaggccatggggtt

SEQ ID NO: 64771 - DNA, 19 bp, Homo sapiens
  source 1..19: mol_type = genomic DNA
atggataaggcatcagcct

SEQ ID NO: 64772 - DNA, 21 bp, Homo sapiens
  source 1..21: mol_type = genomic DNA
atggataaggcatcagcctcc

SEQ ID NO: 64773 - DNA, 16 bp, Homo sapiens
  source 1..16: mol_type = genomic DNA
atggatagcgcattgg

SEQ ID NO: 64774 - DNA, 17 bp, Homo sapiens
  source 1..17: mol_type = genomic DNA
atgggactcttaatccc

SEQ ID NO: 64775 - DNA, 19 bp, Homo sapiens
  source 1..19: mol_type = genomic DNA
atggggtgtgataggtggc

SEQ ID NO: 64776 - DNA, 25 bp, Homo sapiens
  source 1..25: mol_type = genomic DNA
atgggtggttcagtggtagaattct

SEQ ID NO: 64777 - DNA, 17 bp, Homo sapiens
  source 1..17: mol_type = genomic DNA
atggtggagttaaagac

SEQ ID NO: 64778 - DNA, 18 bp, Homo sapiens
  source 1..18: mol_type = genomic DNA
atggtggagttaaagact

SEQ ID NO: 64779 - DNA, 19 bp, Homo sapiens
  source 1..19: mol_type = genomic DNA
atggtggagttaaagactt

SEQ ID NO: 64780 - DNA, 20 bp, Homo sapiens
  source 1..20: mol_type = genomic DNA
atggtggagttaaagacttt

SEQ ID NO: 64781 - DNA, 24 bp, Homo sapiens
  source 1..24: mol_type = genomic DNA
atggtgtaatggttagcactctgg

SEQ ID NO: 64782 - DNA, 16 bp, Homo sapiens
  source 1..16: mol_type = genomic DNA
atggttagcactctgg

SEQ ID NO: 64783 - DNA, 17 bp, Homo sapiens
  source 1..17: mol_type = genomic DNA
atggttagcactctgga

SEQ ID NO: 64784 - DNA, 19 bp, Homo sapiens
  source 1..19: mol_type = genomic DNA
atggttagcactctggact

SEQ ID NO: 64785 - DNA, 20 bp, Homo sapiens
  source 1..20: mol_type = genomic DNA
atggttagcactctggactc

SEQ ID NO: 64786 - DNA, 16 bp, Homo sapiens
  source 1..16: mol_type = genomic DNA
atgtctaacaacatgg

SEQ ID NO: 64787 - DNA, 17 bp, Homo sapiens
  source 1..17: mol_type = genomic DNA
atgtctaacaacatggc

SEQ ID NO: 64788 - DNA, 18 bp, Homo sapiens
  source 1..18: mol_type = genomic DNA
atgtctaacaacatggct

SEQ ID NO: 64789 - DNA, 19 bp, Homo sapiens
  source 1..19: mol_type = genomic DNA
atgtctaacaacatggctt

SEQ ID NO: 64790 - DNA, 20 bp, Homo sapiens
  source 1..20: mol_type = genomic DNA
atgtctaacaacatggcttt

SEQ ID NO: 64791 - DNA, 21 bp, Homo sapiens
  source 1..21: mol_type = genomic DNA
atgtctaacaacatggctttc

SEQ ID NO: 64792 - DNA, 22 bp, Homo sapiens
  source 1..22: mol_type = genomic DNA
atgtctaacaacatggctttct

SEQ ID NO: 64793 - DNA, 23 bp, Homo sapiens
  source 1..23: mol_type = genomic DNA
atgtctaacaacatggctttctc

SEQ ID NO: 64794 - DNA, 24 bp, Homo sapiens
  source 1..24: mol_type = genomic DNA
atgtctaacaacatggctttctca

SEQ ID NO: 64795 - DNA, 16 bp, Homo sapiens
  source 1..16: mol_type = genomic DNA
atgtttagacgggctc

SEQ ID NO: 64796 - DNA, 17 bp, Homo sapiens
  source 1..17: mol_type = genomic DNA
atgtttagacgggctca

SEQ ID NO: 64797 - DNA, 18 bp, Homo sapiens
  source 1..18: mol_type = genomic DNA
atgtttagacgggctcac

SEQ ID NO: 64798 - DNA, 19 bp, Homo sapiens
  source 1..19: mol_type = genomic DNA
atgtttagacgggctcaca

SEQ ID NO: 64799 - DNA, 20 bp, Homo sapiens
  source 1..20: mol_type = genomic DNA
atgtttagacgggctcacat

SEQ ID NO: 64800 - DNA, 21 bp, Homo sapiens
  source 1..21: mol_type = genomic DNA
atgtttagacgggctcacatc

SEQ ID NO: 64801 - DNA, 22 bp, Homo sapiens
  source 1..22: mol_type = genomic DNA
atgtttagacgggctcacatca

SEQ ID NO: 64802 - DNA, 23 bp, Homo sapiens
  source 1..23: mol_type = genomic DNA
atgtttagacgggctcacatcac

SEQ ID NO: 64803 - DNA, 24 bp, Homo sapiens
  source 1..24: mol_type = genomic DNA
atgtttagacgggctcacatcacc

SEQ ID NO: 64804 - DNA, 25 bp, Homo sapiens
  source 1..25: mol_type = genomic DNA
atgtttagacgggctcacatcaccc

SEQ ID NO: 64805 - DNA, 19 bp, Homo sapiens
  source 1..19: mol_type = genomic DNA
attaaagtggctgatttgc

SEQ ID NO: 64806 - DNA, 23 bp, Homo sapiens
  source 1..23: mol_type = genomic DNA
attaaattatgataatcatattt

SEQ ID NO: 64807 - DNA, 19 bp, Homo sapiens
  source 1..19: mol_type = genomic DNA
attaactagttttgacaac

SEQ ID NO: 64808 - DNA, 20 bp, Homo sapiens
  source 1..20: mol_type = genomic DNA
attaactagttttgacaaca

SEQ ID NO: 64809 - DNA, 21 bp, Homo sapiens
  source 1..21: mol_type = genomic DNA
attaagagaaccaacacctct

SEQ ID NO: 64810 - DNA, 19 bp, Homo sapiens
  source 1..19: mol_type = genomic DNA
attagaatcttagctttgg

SEQ ID NO: 64811 - DNA, 18 bp, Homo sapiens
  source 1..18: mol_type = genomic DNA
attagctcaaatggtaga

SEQ ID NO: 64812 - DNA, 16 bp, Homo sapiens
  source 1..16: mol_type = genomic DNA
attataggctaaatcc

SEQ ID NO: 64813 - DNA, 17 bp, Homo sapiens
  source 1..17: mol_type = genomic DNA
attcaaaaaagagtacc

SEQ ID NO: 64814 - DNA, 18 bp, Homo sapiens
  source 1..18: mol_type = genomic DNA
attcaaaaaagagtacca

SEQ ID NO: 64815 - DNA, 17 bp, Homo sapiens
  source 1..17: mol_type = genomic DNA
attccccgacggggagc

SEQ ID NO: 64816 - DNA, 19 bp, Homo sapiens
  source 1..19: mol_type = genomic DNA
attccccgacggggagcca

SEQ ID NO: 64817 - DNA, 18 bp, Homo sapiens
  source 1..18: mol_type = genomic DNA
attcccggccaacgcacc

SEQ ID NO: 64818 - DNA, 19 bp, Homo sapiens
  source 1..19: mol_type = genomic DNA
attcccggccaacgcacca

SEQ ID NO: 64819 - DNA, 19 bp, Homo sapiens
  source 1..19: mol_type = genomic DNA
attcccggccaatgcacca

SEQ ID NO: 64820 - DNA, 18 bp, Homo sapiens
  source 1..18: mol_type = genomic DNA
attcccgggcggcgcacc

SEQ ID NO: 64821 - DNA, 19 bp, Homo sapiens
  source 1..19: mol_type = genomic DNA
attcccgggcggcgcacca

SEQ ID NO: 64822 - DNA, 19 bp, Homo sapiens
  source 1..19: mol_type = genomic DNA
attcccggtcagggaacca

SEQ ID NO: 64823 - DNA, 18 bp, Homo sapiens
  source 1..18: mol_type = genomic DNA
attccggctcgaaggacc

SEQ ID NO: 64824 - DNA, 19 bp, Homo sapiens
  source 1..19: mol_type = genomic DNA
attccggctcgaaggacca

SEQ ID NO: 64825 - DNA, 19 bp, Homo sapiens
  source 1..19: mol_type = genomic DNA
attccttccttttttgcca

SEQ ID NO: 64826 - DNA, 17 bp, Homo sapiens
  source 1..17: mol_type = genomic DNA
attctcagggatgggtt

SEQ ID NO: 64827 - DNA, 18 bp, Homo sapiens
  source 1..18: mol_type = genomic DNA
attctcatagtcctagcc

SEQ ID NO: 64828 - DNA, 17 bp, Homo sapiens
  source 1..17: mol_type = genomic DNA
attcttgcgacccgggt

SEQ ID NO: 64829 - DNA, 19 bp, Homo sapiens
  source 1..19: mol_type = genomic DNA
attcttgcgacccgggttc

SEQ ID NO: 64830 - DNA, 20 bp, Homo sapiens
  source 1..20: mol_type = genomic DNA
attcttgcgacccgggttcg

SEQ ID NO: 64831 - DNA, 18 bp, Homo sapiens
  source 1..18: mol_type = genomic DNA
attgagggttcgagtccc

SEQ ID NO: 64832 - DNA, 19 bp, Homo sapiens
  source 1..19: mol_type = genomic DNA
attgagggttcgagtccct

SEQ ID NO: 64833 - DNA, 16 bp, Homo sapiens
  source 1..16: mol_type = genomic DNA
attggtcgtggttgta

SEQ ID NO: 64834 - DNA, 17 bp, Homo sapiens
  source 1..17: mol_type = genomic DNA
attggtcgtggttgtag

SEQ ID NO: 64835 - DNA, 18 bp, Homo sapiens
  source 1..18: mol_type = genomic DNA
attggtcgtggttgtagt

SEQ ID NO: 64836 - DNA, 19 bp, Homo sapiens
  source 1..19: mol_type = genomic DNA
attggtcgtggttgtagtc

SEQ ID NO: 64837 - DNA, 20 bp, Homo sapiens
  source 1..20: mol_type = genomic DNA
attggtcgtggttgtagtcc

SEQ ID NO: 64838 - DNA, 21 bp, Homo sapiens
  source 1..21: mol_type = genomic DNA
attggtcgtggttgtagtccg

SEQ ID NO: 64839 - DNA, 23 bp, Homo sapiens
  source 1..23: mol_type = genomic DNA
attggtcgtggttgtagtccgtg

SEQ ID NO: 64840 - DNA, 24 bp, Homo sapiens
  source 1..24: mol_type = genomic DNA
attggtcgtggttgtagtccgtgc

SEQ ID NO: 64841 - DNA, 25 bp, Homo sapiens
  source 1..25: mol_type = genomic DNA
attggtcgtggttgtagtccgtgcg

SEQ ID NO: 64842 - DNA, 20 bp, Homo sapiens
  source 1..20: mol_type = genomic DNA
attggtggttcagtggtaga

SEQ ID NO: 64843 - DNA, 21 bp, Homo sapiens
  source 1..21: mol_type = genomic DNA
attggtggttcagtggtagaa

SEQ ID NO: 64844 - DNA, 24 bp, Homo sapiens
  source 1..24: mol_type = genomic DNA
attggtggttcagtggtagaattc

SEQ ID NO: 64845 - DNA, 25 bp, Homo sapiens
  source 1..25: mol_type = genomic DNA
attggtggttcagtggtagaattct

SEQ ID NO: 64846 - DNA, 16 bp, Homo sapiens
  source 1..16: mol_type = genomic DNA
attgtgaatctgacaa

SEQ ID NO: 64847 - DNA, 17 bp, Homo sapiens
  source 1..17: mol_type = genomic DNA
attgtgaatctgacaac

SEQ ID NO: 64848 - DNA, 18 bp, Homo sapiens
  source 1..18: mol_type = genomic DNA
attgtgaatctgacaaca

SEQ ID NO: 64849 - DNA, 19 bp, Homo sapiens
  source 1..19: mol_type = genomic DNA
attgtgaatctgacaacag

SEQ ID NO: 64850 - DNA, 20 bp, Homo sapiens
  source 1..20: mol_type = genomic DNA
attgtgaatctgacaacaga

SEQ ID NO: 64851 - DNA, 21 bp, Homo sapiens
  source 1..21: mol_type = genomic DNA
attgtgaatctgacaacagag

SEQ ID NO: 64852 - DNA, 23 bp, Homo sapiens
  source 1..23: mol_type = genomic DNA
attgtgaatctgacaacagaggc

SEQ ID NO: 64853 - DNA, 19 bp, Homo sapiens
  source 1..19: mol_type = genomic DNA
atttcaacttaacttgacc

SEQ ID NO: 64854 - DNA, 21 bp, Homo sapiens
  source 1..21: mol_type = genomic DNA
atttcaacttaacttgaccgc

SEQ ID NO: 64855 - DNA, 22 bp, Homo sapiens
  source 1..22: mol_type = genomic DNA
atttcaacttaacttgaccgct

SEQ ID NO: 64856 - DNA, 23 bp, Homo sapiens
  source 1..23: mol_type = genomic DNA
atttcaacttaacttgaccgctc

SEQ ID NO: 64857 - DNA, 17 bp, Homo sapiens
  source 1..17: mol_type = genomic DNA
atttcgatggcgtgggt

SEQ ID NO: 64858 - DNA, 17 bp, Homo sapiens
  source 1..17: mol_type = genomic DNA
attttggtgcaactcca

SEQ ID NO: 64859 - DNA, 21 bp, Homo sapiens
  source 1..21: mol_type = genomic DNA
attttggtgcaactccaaata

SEQ ID NO: 64860 - DNA, 19 bp, Homo sapiens
  source 1..19: mol_type = genomic DNA
caaaaattttggtgcaact

SEQ ID NO: 64861 - DNA, 20 bp, Homo sapiens
  source 1..20: mol_type = genomic DNA
caaaaattttggtgcaactc

SEQ ID NO: 64862 - DNA, 21 bp, Homo sapiens
  source 1..21: mol_type = genomic DNA
caaaaattttggtgcaactcc

SEQ ID NO: 64863 - DNA, 25 bp, Homo sapiens
  source 1..25: mol_type = genomic DNA
caaaaattttggtgcaactccaaat

SEQ ID NO: 64864 - DNA, 16 bp, Homo sapiens
  source 1..16: mol_type = genomic DNA
caaaacatcagattgt

SEQ ID NO: 64865 - DNA, 17 bp, Homo sapiens
  source 1..17: mol_type = genomic DNA
caaaacatcagattgtg

SEQ ID NO: 64866 - DNA, 18 bp, Homo sapiens
  source 1..18: mol_type = genomic DNA
caaaacatcagattgtga

SEQ ID NO: 64867 - DNA, 19 bp, Homo sapiens
  source 1..19: mol_type = genomic DNA
caaaacatcagattgtgaa

SEQ ID NO: 64868 - DNA, 20 bp, Homo sapiens
  source 1..20: mol_type = genomic DNA
caaaacatcagattgtgaat

SEQ ID NO: 64869 - DNA, 21 bp, Homo sapiens
  source 1..21: mol_type = genomic DNA
caaaacatcagattgtgaatc

SEQ ID NO: 64870 - DNA, 24 bp, Homo sapiens
  source 1..24: mol_type = genomic DNA
caaaacatcagattgtgaatctga

SEQ ID NO: 64871 - DNA, 25 bp, Homo sapiens
  source 1..25: mol_type = genomic DNA
caaaacatcagattgtgaatctgac

SEQ ID NO: 64872 - DNA, 17 bp, Homo sapiens
  source 1..17: mol_type = genomic DNA
caaaacgaatgatttcg

SEQ ID NO: 64873 - DNA, 19 bp, Homo sapiens
  source 1..19: mol_type = genomic DNA
caaaacgaatgatttcgac

SEQ ID NO: 64874 - DNA, 20 bp, Homo sapiens
  source 1..20: mol_type = genomic DNA
caaaacgaatgatttcgact

SEQ ID NO: 64875 - DNA, 21 bp, Homo sapiens
  source 1..21: mol_type = genomic DNA
caaaacgaatgatttcgactc

SEQ ID NO: 64876 - DNA, 22 bp, Homo sapiens
  source 1..22: mol_type = genomic DNA
caaaacgaatgatttcgactca

SEQ ID NO: 64877 - DNA, 23 bp, Homo sapiens
  source 1..23: mol_type = genomic DNA
caaaacgaatgatttcgactcat

SEQ ID NO: 64878 - DNA, 17 bp, Homo sapiens
  source 1..17: mol_type = genomic DNA
caaacctgccggggctt

SEQ ID NO: 64879 - DNA, 18 bp, Homo sapiens
  source 1..18: mol_type = genomic DNA
caaacctgccggggcttc

SEQ ID NO: 64880 - DNA, 19 bp, Homo sapiens
  source 1..19: mol_type = genomic DNA
caaacctgccggggcttcc

SEQ ID NO: 64881 - DNA, 20 bp, Homo sapiens
  source 1..20: mol_type = genomic DNA
caaacctgccggggcttcca

SEQ ID NO: 64882 - DNA, 16 bp, Homo sapiens
  source 1..16: mol_type = genomic DNA
caaagcaatacactga

SEQ ID NO: 64883 - DNA, 17 bp, Homo sapiens
  source 1..17: mol_type = genomic DNA
caaagcaatacactgaa

SEQ ID NO: 64884 - DNA, 19 bp, Homo sapiens
  source 1..19: mol_type = genomic DNA
caaagcaatacactgaaaa

SEQ ID NO: 64885 - DNA, 17 bp, Homo sapiens
  source 1..17: mol_type = genomic DNA
caaagcacccaacttac

SEQ ID NO: 64886 - DNA, 18 bp, Homo sapiens
  source 1..18: mol_type = genomic DNA
caaagcacccaacttaca

SEQ ID NO: 64887 - DNA, 19 bp, Homo sapiens
  source 1..19: mol_type = genomic DNA
caaagcacccaacttacac

SEQ ID NO: 64888 - DNA, 21 bp, Homo sapiens
  source 1..21: mol_type = genomic DNA
caaagcacccaacttacactt

SEQ ID NO: 64889 - DNA, 17 bp, Homo sapiens
  source 1..17: mol_type = genomic DNA
caaagttaaattatagg

SEQ ID NO: 64890 - DNA, 21 bp, Homo sapiens
  source 1..21: mol_type = genomic DNA
caaagttaaattataggctaa

SEQ ID NO: 64891 - DNA, 19 bp, Homo sapiens
  source 1..19: mol_type = genomic DNA
caaatcccggacgagcccc

SEQ ID NO: 64892 - DNA, 20 bp, Homo sapiens
  source 1..20: mol_type = genomic DNA
caaatcccggacgagccccc

SEQ ID NO: 64893 - DNA, 20 bp, Homo sapiens
  source 1..20: mol_type = genomic DNA
caaatctcggtggaacctcc

SEQ ID NO: 64894 - DNA, 21 bp, Homo sapiens
  source 1..21: mol_type = genomic DNA
caaatctcggtggaacctcca

SEQ ID NO: 64895 - DNA, 19 bp, Homo sapiens
  source 1..19: mol_type = genomic DNA
caacacctctttacagtga

SEQ ID NO: 64896 - DNA, 20 bp, Homo sapiens
  source 1..20: mol_type = genomic DNA
caacacctctttacagtgac

SEQ ID NO: 64897 - DNA, 21 bp, Homo sapiens
  source 1..21: mol_type = genomic DNA
caacacctctttacagtgacc

SEQ ID NO: 64898 - DNA, 22 bp, Homo sapiens
  source 1..22: mol_type = genomic DNA
caacacctctttacagtgacca

SEQ ID NO: 64899 - DNA, 18 bp, Homo sapiens
  source 1..18: mol_type = genomic DNA
caacatggctttctcacc

SEQ ID NO: 64900 - DNA, 19 bp, Homo sapiens
  source 1..19: mol_type = genomic DNA
caacatggctttctcacca

SEQ ID NO: 64901 - DNA, 21 bp, Homo sapiens
  source 1..21: mol_type = genomic DNA
caacattcaaaaaagagtacc

SEQ ID NO: 64902 - DNA, 22 bp, Homo sapiens
  source 1..22: mol_type = genomic DNA
caacattcaaaaaagagtacca

SEQ ID NO: 64903 - DNA, 20 bp, Homo sapiens
  source 1..20: mol_type = genomic DNA
caacgatggtttttcatatc

SEQ ID NO: 64904 - DNA, 21 bp, Homo sapiens
  source 1..21: mol_type = genomic DNA
caacgatggtttttcatatca

SEQ ID NO: 64905 - DNA, 19 bp, Homo sapiens
  source 1..19: mol_type = genomic DNA
caactccaaataaaagtac

SEQ ID NO: 64906 - DNA, 20 bp, Homo sapiens
  source 1..20: mol_type = genomic DNA
caactccaaataaaagtacc

SEQ ID NO: 64907 - DNA, 21 bp, Homo sapiens
  source 1..21: mol_type = genomic DNA
caactccaaataaaagtacca

SEQ ID NO: 64908 - DNA, 17 bp, Homo sapiens
  source 1..17: mol_type = genomic DNA
caacttaacttgaccgc

SEQ ID NO: 64909 - DNA, 18 bp, Homo sapiens
  source 1..18: mol_type = genomic DNA
caacttaacttgaccgct

SEQ ID NO: 64910 - DNA, 19 bp, Homo sapiens
  source 1..19: mol_type = genomic DNA
caacttaacttgaccgctc

SEQ ID NO: 64911 - DNA, 20 bp, Homo sapiens
  source 1..20: mol_type = genomic DNA
caacttaacttgaccgctct

SEQ ID NO: 64912 - DNA, 21 bp, Homo sapiens
  source 1..21: mol_type = genomic DNA
caacttaacttgaccgctctg

SEQ ID NO: 64913 - DNA, 22 bp, Homo sapiens
  source 1..22: mol_type = genomic DNA
caacttaacttgaccgctctga

SEQ ID NO: 64914 - DNA, 23 bp, Homo sapiens
  source 1..23: mol_type = genomic DNA
caacttaacttgaccgctctgac

SEQ ID NO: 64915 - DNA, 24 bp, Homo sapiens
  source 1..24: mol_type = genomic DNA
caacttaacttgaccgctctgacc

SEQ ID NO: 64916 - DNA, 25 bp, Homo sapiens
  source 1..25: mol_type = genomic DNA
caacttaacttgaccgctctgacca

SEQ ID NO: 64917 - DNA, 16 bp, Homo sapiens
  source 1..16: mol_type = genomic DNA
caacttacacttagga

SEQ ID NO: 64918 - DNA, 17 bp, Homo sapiens
  source 1..17: mol_type = genomic DNA
caacttacacttaggag

SEQ ID NO: 64919 - DNA, 18 bp, Homo sapiens
  source 1..18: mol_type = genomic DNA
caacttacacttaggaga

SEQ ID NO: 64920 - DNA, 19 bp, Homo sapiens
  source 1..19: mol_type = genomic DNA
caacttacacttaggagat

SEQ ID NO: 64921 - DNA, 20 bp, Homo sapiens
  source 1..20: mol_type = genomic DNA
caacttacacttaggagatt

SEQ ID NO: 64922 - DNA, 21 bp, Homo sapiens
  source 1..21: mol_type = genomic DNA
caacttacacttaggagattt

SEQ ID NO: 64923 - DNA, 23 bp, Homo sapiens
  source 1..23: mol_type = genomic DNA
caacttacacttaggagatttca

SEQ ID NO: 64924 - DNA, 16 bp, Homo sapiens
  source 1..16: mol_type = genomic DNA
caagaactgctaactc

SEQ ID NO: 64925 - DNA, 17 bp, Homo sapiens
  source 1..17: mol_type = genomic DNA
caagaactgctaactca

SEQ ID NO: 64926 - DNA, 18 bp, Homo sapiens
  source 1..18: mol_type = genomic DNA
caagaactgctaactcat

SEQ ID NO: 64927 - DNA, 19 bp, Homo sapiens
  source 1..19: mol_type = genomic DNA
caagaactgctaactcatg

SEQ ID NO: 64928 - DNA, 20 bp, Homo sapiens
  source 1..20: mol_type = genomic DNA
caagaactgctaactcatgc

SEQ ID NO: 64929 - DNA, 21 bp, Homo sapiens
  source 1..21: mol_type = genomic DNA
caagaactgctaactcatgcc

SEQ ID NO: 64930 - DNA, 17 bp, Homo sapiens
  source 1..17: mol_type = genomic DNA
caagaggtccccggttc

SEQ ID NO: 64931 - DNA, 18 bp, Homo sapiens
  source 1..18: mol_type = genomic DNA
caagcagttgacccgggt

SEQ ID NO: 64932 - DNA, 19 bp, Homo sapiens
  source 1..19: mol_type = genomic DNA
caagcagttgacccgggtt

SEQ ID NO: 64933 - DNA, 20 bp, Homo sapiens
  source 1..20: mol_type = genomic DNA
caagcagttgacccgggttc

SEQ ID NO: 64934 - DNA, 20 bp, Homo sapiens
  source 1..20: mol_type = genomic DNA
caagtccctgttcgggcgcc

SEQ ID NO: 64935 - DNA, 18 bp, Homo sapiens
  source 1..18: mol_type = genomic DNA
caagttctggtctccaat

SEQ ID NO: 64936 - DNA, 19 bp, Homo sapiens
  source 1..19: mol_type = genomic DNA
caagttctggtctccaatg

SEQ ID NO: 64937 - DNA, 17 bp, Homo sapiens
  source 1..17: mol_type = genomic DNA
caagttctggtctccgg

SEQ ID NO: 64938 - DNA, 18 bp, Homo sapiens
  source 1..18: mol_type = genomic DNA
caagttctggtctccgga

SEQ ID NO: 64939 - DNA, 19 bp, Homo sapiens
  source 1..19: mol_type = genomic DNA
caagttctggtctccggat

SEQ ID NO: 64940 - DNA, 18 bp, Homo sapiens
  source 1..18: mol_type = genomic DNA
caatacttaatttctgcc

SEQ ID NO: 64941 - DNA, 19 bp, Homo sapiens
  source 1..19: mol_type = genomic DNA
caatacttaatttctgcca

SEQ ID NO: 64942 - DNA, 18 bp, Homo sapiens
  source 1..18: mol_type = genomic DNA
caatggatagcgcattgg

SEQ ID NO: 64943 - DNA, 21 bp, Homo sapiens
  source 1..21: mol_type = genomic DNA
caattaactagttttgacaac

SEQ ID NO: 64944 - DNA, 22 bp, Homo sapiens
  source 1..22: mol_type = genomic DNA
caattaactagttttgacaaca

SEQ ID NO: 64945 - DNA, 20 bp, Homo sapiens
  source 1..20: mol_type = genomic DNA
caattcctcttcttaacacc

SEQ ID NO: 64946 - DNA, 16 bp, Homo sapiens
  source 1..16: mol_type = genomic DNA
cacaaagcacccaact

SEQ ID NO: 64947 - DNA, 19 bp, Homo sapiens
  source 1..19: mol_type = genomic DNA
cacaaagcacccaacttac

SEQ ID NO: 64948 - DNA, 16 bp, Homo sapiens
  source 1..16: mol_type = genomic DNA
cacaagaactgctaac

SEQ ID NO: 64949 - DNA, 17 bp, Homo sapiens
  source 1..17: mol_type = genomic DNA
cacaagaactgctaact

SEQ ID NO: 64950 - DNA, 18 bp, Homo sapiens
  source 1..18: mol_type = genomic DNA
cacaagaactgctaactc

SEQ ID NO: 64951 - DNA, 19 bp, Homo sapiens
  source 1..19: mol_type = genomic DNA
cacaagaactgctaactca

SEQ ID NO: 64952 - DNA, 20 bp, Homo sapiens
  source 1..20: mol_type = genomic DNA
cacaagaactgctaactcat

SEQ ID NO: 64953 - DNA, 21 bp, Homo sapiens
  source 1..21: mol_type = genomic DNA
cacaagaactgctaactcatg

SEQ ID NO: 64954 - DNA, 22 bp, Homo sapiens
  source 1..22: mol_type = genomic DNA
cacaagaactgctaactcatgc

SEQ ID NO: 64955 - DNA, 17 bp, Homo sapiens
  source 1..17: mol_type = genomic DNA
cacatcaccccataaac

SEQ ID NO: 64956 - DNA, 18 bp, Homo sapiens
  source 1..18: mol_type = genomic DNA
cacatcaccccataaaca

SEQ ID NO: 64957 - DNA, 20 bp, Homo sapiens
  source 1..20: mol_type = genomic DNA
cacatcaccccataaacacc

SEQ ID NO: 64958 - DNA, 21 bp, Homo sapiens
  source 1..21: mol_type = genomic DNA
cacatcaccccataaacacca

SEQ ID NO: 64959 - DNA, 24 bp, Homo sapiens
  source 1..24: mol_type = genomic DNA
cacatggtctagcggttaggattc

SEQ ID NO: 64960 - DNA, 25 bp, Homo sapiens
  source 1..25: mol_type = genomic DNA
cacatggtctagcggttaggattcc

SEQ ID NO: 64961 - DNA, 17 bp, Homo sapiens
  source 1..17: mol_type = genomic DNA
cacccaacttacactta

SEQ ID NO: 64962 - DNA, 19 bp, Homo sapiens
  source 1..19: mol_type = genomic DNA
cacccaacttacacttagg

SEQ ID NO: 64963 - DNA, 22 bp, Homo sapiens
  source 1..22: mol_type = genomic DNA
cacccaacttacacttaggaga

SEQ ID NO: 64964 - DNA, 19 bp, Homo sapiens
  source 1..19: mol_type = genomic DNA
cacccaggcggcccgggtt

SEQ ID NO: 64965 - DNA, 20 bp, Homo sapiens
  source 1..20: mol_type = genomic DNA
cacccaggcggcccgggttc

SEQ ID NO: 64966 - DNA, 16 bp, Homo sapiens
  source 1..16: mol_type = genomic DNA
caccccataaacacca

SEQ ID NO: 64967 - DNA, 19 bp, Homo sapiens
  source 1..19: mol_type = genomic DNA
caccgccgcggcccgggtt

SEQ ID NO: 64968 - DNA, 20 bp, Homo sapiens
  source 1..20: mol_type = genomic DNA
caccgccgcggcccgggttc

SEQ ID NO: 64969 - DNA, 16 bp, Homo sapiens
  source 1..16: mol_type = genomic DNA
cacctctttacagtga

SEQ ID NO: 64970 - DNA, 17 bp, Homo sapiens
  source 1..17: mol_type = genomic DNA
cacctctttacagtgac

SEQ ID NO: 64971 - DNA, 18 bp, Homo sapiens
  source 1..18: mol_type = genomic DNA
cacctctttacagtgacc

SEQ ID NO: 64972 - DNA, 19 bp, Homo sapiens
  source 1..19: mol_type = genomic DNA
cacctctttacagtgacca

SEQ ID NO: 64973 - DNA, 17 bp, Homo sapiens
  source 1..17: mol_type = genomic DNA
cacgcgggagaccgggg

SEQ ID NO: 64974 - DNA, 18 bp, Homo sapiens
  source 1..18: mol_type = genomic DNA
cacgcgggagaccggggt

SEQ ID NO: 64975 - DNA, 16 bp, Homo sapiens
  source 1..16: mol_type = genomic DNA
cacgtcggggtcacca

SEQ ID NO: 64976 - DNA, 18 bp, Homo sapiens
  source 1..18: mol_type = genomic DNA
cactctggactctgaatc

SEQ ID NO: 64977 - DNA, 19 bp, Homo sapiens
  source 1..19: mol_type = genomic DNA
cactctggactctgaatcc

SEQ ID NO: 64978 - DNA, 20 bp, Homo sapiens
  source 1..20: mol_type = genomic DNA
cactctggactctgaatcca

SEQ ID NO: 64979 - DNA, 16 bp, Homo sapiens
  source 1..16: mol_type = genomic DNA
cactgtaaagctaact

SEQ ID NO: 64980 - DNA, 17 bp, Homo sapiens
  source 1..17: mol_type = genomic DNA
cactgtaaagctaactt

SEQ ID NO: 64981 - DNA, 18 bp, Homo sapiens
  source 1..18: mol_type = genomic DNA
cactgtaaagctaactta

SEQ ID NO: 64982 - DNA, 19 bp, Homo sapiens
  source 1..19: mol_type = genomic DNA
cactgtaaagctaacttag

SEQ ID NO: 64983 - DNA, 20 bp, Homo sapiens
  source 1..20: mol_type = genomic DNA
cactgtaaagctaacttagc

SEQ ID NO: 64984 - DNA, 21 bp, Homo sapiens
  source 1..21: mol_type = genomic DNA
cactgtaaagctaacttagca

SEQ ID NO: 64985 - DNA, 22 bp, Homo sapiens
  source 1..22: mol_type = genomic DNA
cactgtaaagctaacttagcat

SEQ ID NO: 64986 - DNA, 23 bp, Homo sapiens
  source 1..23: mol_type = genomic DNA
cactgtaaagctaacttagcatt

SEQ ID NO: 64987 - DNA, 24 bp, Homo sapiens
  source 1..24: mol_type = genomic DNA
cactgtaaagctaacttagcatta

SEQ ID NO: 64988 - DNA, 25 bp, Homo sapiens
  source 1..25: mol_type = genomic DNA
cactgtaaagctaacttagcattaa

SEQ ID NO: 64989 - DNA, 16 bp, Homo sapiens
  source 1..16: mol_type = genomic DNA
cacttaggagatttca

SEQ ID NO: 64990 - DNA, 18 bp, Homo sapiens
  source 1..18: mol_type = genomic DNA
cacttaggagatttcaac

SEQ ID NO: 64991 - DNA, 19 bp, Homo sapiens
  source 1..19: mol_type = genomic DNA
cacttaggagatttcaact

SEQ ID NO: 64992 - DNA, 20 bp, Homo sapiens
  source 1..20: mol_type = genomic DNA
cacttaggagatttcaactt

SEQ ID NO: 64993 - DNA, 21 bp, Homo sapiens
  source 1..21: mol_type = genomic DNA
cacttaggagatttcaactta

SEQ ID NO: 64994 - DNA, 24 bp, Homo sapiens
  source 1..24: mol_type = genomic DNA
cacttaggagatttcaacttaact

SEQ ID NO: 64995 - DNA, 18 bp, Homo sapiens
  source 1..18: mol_type = genomic DNA
cagaagattccaggttcg

SEQ ID NO: 64996 - DNA, 18 bp, Homo sapiens
  source 1..18: mol_type = genomic DNA
cagaagattgagggttcg

SEQ ID NO: 64997 - DNA, 18 bp, Homo sapiens
  source 1..18: mol_type = genomic DNA
cagaagattgcaggttcg

SEQ ID NO: 64998 - DNA, 16 bp, Homo sapiens
  source 1..16: mol_type = genomic DNA
cagaccaagagccttc

SEQ ID NO: 64999 - DNA, 17 bp, Homo sapiens
  source 1..17: mol_type = genomic DNA
cagaccaagagccttca

SEQ ID NO: 65000 - DNA, 16 bp, Homo sapiens
  source 1..16: mol_type = genomic DNA
cagagaatagtttaaa

SEQ ID NO: 65001 - DNA, 17 bp, Homo sapiens
  source 1..17: mol_type = genomic DNA
cagagaatagtttaaat

SEQ ID NO: 65002 - DNA, 18 bp, Homo sapiens
  source 1..18: mol_type = genomic DNA
cagagaatagtttaaatt

SEQ ID NO: 65003 - DNA, 19 bp, Homo sapiens
  source 1..19: mol_type = genomic DNA
cagagaatagtttaaatta

SEQ ID NO: 65004 - DNA, 20 bp, Homo sapiens
  source 1..20: mol_type = genomic DNA
cagagaatagtttaaattag

SEQ ID NO: 65005 - DNA, 21 bp, Homo sapiens
  source 1..21: mol_type = genomic DNA
cagagaatagtttaaattaga

SEQ ID NO: 65006 - DNA, 22 bp, Homo sapiens
  source 1..22: mol_type = genomic DNA
cagagaatagtttaaattagaa

SEQ ID NO: 65007 - DNA, 23 bp, Homo sapiens
  source 1..23: mol_type = genomic DNA
cagagaatagtttaaattagaat

SEQ ID NO: 65008 - DNA, 24 bp, Homo sapiens
  source 1..24: mol_type = genomic DNA
cagagaatagtttaaattagaatc

SEQ ID NO: 65009 - DNA, 25 bp, Homo sapiens
  source 1..25: mol_type = genomic DNA
cagagaatagtttaaattagaatct

SEQ ID NO: 65010 - DNA, 16 bp, Homo sapiens
  source 1..16: mol_type = genomic DNA
cagaggtcgatggatc

SEQ ID NO: 65011 - DNA, 17 bp, Homo sapiens
  source 1..17: mol_type = genomic DNA
cagaggtcgatggatcg

SEQ ID NO: 65012 - DNA, 16 bp, Homo sapiens
  source 1..16: mol_type = genomic DNA
cagaggttccgggttc

SEQ ID NO: 65013 - DNA, 25 bp, Homo sapiens
  source 1..25: mol_type = genomic DNA
cagagtggcgcagcggaagcgtgct

SEQ ID NO: 65014 - DNA, 16 bp, Homo sapiens
  source 1..16: mol_type = genomic DNA
cagagtgtagcttaac

SEQ ID NO: 65015 - DNA, 17 bp, Homo sapiens
  source 1..17: mol_type = genomic DNA
cagagtgtagcttaaca

SEQ ID NO: 65016 - DNA, 18 bp, Homo sapiens
  source 1..18: mol_type = genomic DNA
cagagtgtagcttaacac

SEQ ID NO: 65017 - DNA, 19 bp, Homo sapiens
  source 1..19: mol_type = genomic DNA
cagagtgtagcttaacaca

SEQ ID NO: 65018 - DNA, 20 bp, Homo sapiens
  source 1..20: mol_type = genomic DNA
cagagtgtagcttaacacaa

SEQ ID NO: 65019 - DNA, 21 bp, Homo sapiens
  source 1..21: mol_type = genomic DNA
cagagtgtagcttaacacaaa

SEQ ID NO: 65020 - DNA, 22 bp, Homo sapiens
  source 1..22: mol_type = genomic DNA
cagagtgtagcttaacacaaag

SEQ ID NO: 65021 - DNA, 23 bp, Homo sapiens
  source 1..23: mol_type = genomic DNA
cagagtgtagcttaacacaaagc

SEQ ID NO: 65022 - DNA, 24 bp, Homo sapiens
  source 1..24: mol_type = genomic DNA
cagagtgtagcttaacacaaagca

SEQ ID NO: 65023 - DNA, 25 bp, Homo sapiens
  source 1..25: mol_type = genomic DNA
cagagtgtagcttaacacaaagcac

SEQ ID NO: 65024 - DNA, 17 bp, Homo sapiens
  source 1..17: mol_type = genomic DNA
cagattgtgaatctgac

SEQ ID NO: 65025 - DNA, 18 bp, Homo sapiens
  source 1..18: mol_type = genomic DNA
cagattgtgaatctgaca

SEQ ID NO: 65026 - DNA, 19 bp, Homo sapiens
  source 1..19: mol_type = genomic DNA
cagattgtgaatctgacaa

SEQ ID NO: 65027 - DNA, 20 bp, Homo sapiens
  source 1..20: mol_type = genomic DNA
cagattgtgaatctgacaac

SEQ ID NO: 65028 - DNA, 21 bp, Homo sapiens
  source 1..21: mol_type = genomic DNA
cagattgtgaatctgacaaca

SEQ ID NO: 65029 - DNA, 22 bp, Homo sapiens
  source 1..22: mol_type = genomic DNA
cagattgtgaatctgacaacag

SEQ ID NO: 65030 - DNA, 23 bp, Homo sapiens
  source 1..23: mol_type = genomic DNA
cagattgtgaatctgacaacaga

SEQ ID NO: 65031 - DNA, 24 bp, Homo sapiens
  source 1..24: mol_type = genomic DNA
cagattgtgaatctgacaacagag

SEQ ID NO: 65032 - DNA, 16 bp, Homo sapiens
  source 1..16: mol_type = genomic DNA
cagcgatccgagttca

SEQ ID NO: 65033 - DNA, 19 bp, Homo sapiens
  source 1..19: mol_type = genomic DNA
cagctaaataagctatcgg

SEQ ID NO: 65034 - DNA, 16 bp, Homo sapiens
  source 1..16: mol_type = genomic DNA
cagctatccattggtc

SEQ ID NO: 65035 - DNA, 17 bp, Homo sapiens
  source 1..17: mol_type = genomic DNA
cagctatccattggtct

SEQ ID NO: 65036 - DNA, 16 bp, Homo sapiens
  source 1..16: mol_type = genomic DNA
caggagatcctgggtt

SEQ ID NO: 65037 - DNA, 17 bp, Homo sapiens
  source 1..17: mol_type = genomic DNA
caggagatcctgggttc

SEQ ID NO: 65038 - DNA, 18 bp, Homo sapiens
  source 1..18: mol_type = genomic DNA
caggagatcctgggttcg

SEQ ID NO: 65039 - DNA, 16 bp, Homo sapiens
  source 1..16: mol_type = genomic DNA
cagggattgtgggttc

SEQ ID NO: 65040 - DNA, 16 bp, Homo sapiens
  source 1..16: mol_type = genomic DNA
caggggtcgcgagttc

SEQ ID NO: 65041 - DNA, 16 bp, Homo sapiens
  source 1..16: mol_type = genomic DNA
cagggtcgtgggttcg

SEQ ID NO: 65042 - DNA, 16 bp, Homo sapiens
  source 1..16: mol_type = genomic DNA
caggtcgcagtctccc

SEQ ID NO: 65043 - DNA, 16 bp, Homo sapiens
  source 1..16: mol_type = genomic DNA
cagtaagttgcaatac

SEQ ID NO: 65044 - DNA, 17 bp, Homo sapiens
  source 1..17: mol_type = genomic DNA
cagtaagttgcaatact

SEQ ID NO: 65045 - DNA, 24 bp, Homo sapiens
  source 1..24: mol_type = genomic DNA
cagtaagttgcaatacttaatttc

SEQ ID NO: 65046 - DNA, 19 bp, Homo sapiens
  source 1..19: mol_type = genomic DNA
cagtcagaggttcaattcc

SEQ ID NO: 65047 - DNA, 21 bp, Homo sapiens
  source 1..21: mol_type = genomic DNA
cagtcagaggttcaattcctc

SEQ ID NO: 65048 - DNA, 22 bp, Homo sapiens
  source 1..22: mol_type = genomic DNA
cagtcagaggttcaattcctct

SEQ ID NO: 65049 - DNA, 16 bp, Homo sapiens
  source 1..16: mol_type = genomic DNA
cagtcggtagagcatc

SEQ ID NO: 65050 - DNA, 17 bp, Homo sapiens
  source 1..17: mol_type = genomic DNA
cagtcggtagagcatca

SEQ ID NO: 65051 - DNA, 18 bp, Homo sapiens
  source 1..18: mol_type = genomic DNA
cagtcggtagagcatcag

SEQ ID NO: 65052 - DNA, 19 bp, Homo sapiens
  source 1..19: mol_type = genomic DNA
cagtcggtagagcatcaga

SEQ ID NO: 65053 - DNA, 20 bp, Homo sapiens
  source 1..20: mol_type = genomic DNA
cagtcggtagagcatcagac

SEQ ID NO: 65054 - DNA, 21 bp, Homo sapiens
  source 1..21: mol_type = genomic DNA
cagtcggtagagcatcagact

SEQ ID NO: 65055 - DNA, 24 bp, Homo sapiens
  source 1..24: mol_type = genomic DNA
cagtcggtagagcatcagactttt

SEQ ID NO: 65056 - DNA, 16 bp, Homo sapiens
  source 1..16: mol_type = genomic DNA
cagtcggtagagcatg

SEQ ID NO: 65057 - DNA, 17 bp, Homo sapiens
  source 1..17: mol_type = genomic DNA
cagtcggtagagcatga

SEQ ID NO: 65058 - DNA, 18 bp, Homo sapiens
  source 1..18: mol_type = genomic DNA
cagtcggtagagcatgag

SEQ ID NO: 65059 - DNA, 19 bp, Homo sapiens
  source 1..19: mol_type = genomic DNA
cagtcggtagagcatgaga

SEQ ID NO: 65060 - DNA, 20 bp, Homo sapiens
  source 1..20: mol_type = genomic DNA
cagtcggtagagcatgagac

SEQ ID NO: 65061 - DNA, 21 bp, Homo sapiens
  source 1..21: mol_type = genomic DNA
cagtcggtagagcatgagact

SEQ ID NO: 65062 - DNA, 22 bp, Homo sapiens
  source 1..22: mol_type = genomic DNA
cagtcggtagagcatgagactc

SEQ ID NO: 65063 - DNA, 23 bp, Homo sapiens
  source 1..23: mol_type = genomic DNA
cagtcggtagagcatgagactct

SEQ ID NO: 65064 - DNA, 24 bp, Homo sapiens
  source 1..24: mol_type = genomic DNA
cagtcggtagagcatgagactctt

SEQ ID NO: 65065 - DNA, 17 bp, Homo sapiens
  source 1..17: mol_type = genomic DNA
cagtcggtagagcatgg

SEQ ID NO: 65066 - DNA, 18 bp, Homo sapiens
  source 1..18: mol_type = genomic DNA
cagtcggtagagcatggg

SEQ ID NO: 65067 - DNA, 19 bp, Homo sapiens
  source 1..19: mol_type = genomic DNA
cagtcggtagagcatggga

SEQ ID NO: 65068 - DNA, 20 bp, Homo sapiens
  source 1..20: mol_type = genomic DNA
cagtcggtagagcatgggac

SEQ ID NO: 65069 - DNA, 21 bp, Homo sapiens
  source 1..21: mol_type = genomic DNA
cagtcggtagagcatgggact

SEQ ID NO: 65070 - DNA, 22 bp, Homo sapiens
  source 1..22: mol_type = genomic DNA
cagtcggtagagcatgggactc

SEQ ID NO: 65071 - DNA, 23 bp, Homo sapiens
  source 1..23: mol_type = genomic DNA
cagtcggtagagcatgggactct

SEQ ID NO: 65072 - DNA, 24 bp, Homo sapiens
  source 1..24: mol_type = genomic DNA
cagtcggtagagcatgggactctt

SEQ ID NO: 65073 - DNA, 16 bp, Homo sapiens
  source 1..16: mol_type = genomic DNA
cagtctcttcgggggc

SEQ ID NO: 65074 - DNA, 23 bp, Homo sapiens
  source 1..23: mol_type = genomic DNA
cagtctcttcgggggcgtgggtt

SEQ ID NO: 65075 - DNA, 24 bp, Homo sapiens
  source 1..24: mol_type = genomic DNA
cagtctcttcgggggcgtgggttc

SEQ ID NO: 65076 - DNA, 18 bp, Homo sapiens
  source 1..18: mol_type = genomic DNA
cagtggtagaattctcgc

SEQ ID NO: 65077 - DNA, 19 bp, Homo sapiens
  source 1..19: mol_type = genomic DNA
cagtggtagaattctcgcc

SEQ ID NO: 65078 - DNA, 20 bp, Homo sapiens
  source 1..20: mol_type = genomic DNA
cagtggtagaattctcgcct

SEQ ID NO: 65079 - DNA, 22 bp, Homo sapiens
  source 1..22: mol_type = genomic DNA
cagtggtagaattctcgcctgc

SEQ ID NO: 65080 - DNA, 23 bp, Homo sapiens
  source 1..23: mol_type = genomic DNA
cagtggtagaattctcgcctgcc

SEQ ID NO: 65081 - DNA, 16 bp, Homo sapiens
  source 1..16: mol_type = genomic DNA
cagtggtagagcattt

SEQ ID NO: 65082 - DNA, 18 bp, Homo sapiens
  source 1..18: mol_type = genomic DNA
cagtggtagagcatttga

SEQ ID NO: 65083 - DNA, 16 bp, Homo sapiens
  source 1..16: mol_type = genomic DNA
cagttgacccgggttc

SEQ ID NO: 65084 - DNA, 17 bp, Homo sapiens
  source 1..17: mol_type = genomic DNA
cagttgacccgggttcg

SEQ ID NO: 65085 - DNA, 16 bp, Homo sapiens
  source 1..16: mol_type = genomic DNA
cagttggtagagcatc

SEQ ID NO: 65086 - DNA, 18 bp, Homo sapiens
  source 1..18: mol_type = genomic DNA
cataaaacttaaaacttt

SEQ ID NO: 65087 - DNA, 19 bp, Homo sapiens
  source 1..19: mol_type = genomic DNA
cataaaacttaaaacttta

SEQ ID NO: 65088 - DNA, 21 bp, Homo sapiens
  source 1..21: mol_type = genomic DNA
cataaaacttaaaactttaca

SEQ ID NO: 65089 - DNA, 24 bp, Homo sapiens
  source 1..24: mol_type = genomic DNA
cataaaacttaaaactttacagtc

SEQ ID NO: 65090 - DNA, 25 bp, Homo sapiens
  source 1..25: mol_type = genomic DNA
cataaaacttaaaactttacagtca

SEQ ID NO: 65091 - DNA, 19 bp, Homo sapiens
  source 1..19: mol_type = genomic DNA
cataatctgaaggtcgtga

SEQ ID NO: 65092 - DNA, 20 bp, Homo sapiens
  source 1..20: mol_type = genomic DNA
catatcattggtcgtggttg

SEQ ID NO: 65093 - DNA, 24 bp, Homo sapiens
  source 1..24: mol_type = genomic DNA
catatggtctagcggttaggattc

SEQ ID NO: 65094 - DNA, 25 bp, Homo sapiens
  source 1..25: mol_type = genomic DNA
catatggtctagcggttaggattcc

SEQ ID NO: 65095 - DNA, 17 bp, Homo sapiens
  source 1..17: mol_type = genomic DNA
catatgtccgcgtgggt

SEQ ID NO: 65096 - DNA, 18 bp, Homo sapiens
  source 1..18: mol_type = genomic DNA
catatgtccgcgtgggtt

SEQ ID NO: 65097 - DNA, 20 bp, Homo sapiens
  source 1..20: mol_type = genomic DNA
catattgaattgcaaattcg

SEQ ID NO: 65098 - DNA, 21 bp, Homo sapiens
  source 1..21: mol_type = genomic DNA
catattgaattgcaaattcga

SEQ ID NO: 65099 - DNA, 16 bp, Homo sapiens
  source 1..16: mol_type = genomic DNA
catcaccccataaaca

SEQ ID NO: 65100 - DNA, 18 bp, Homo sapiens
  source 1..18: mol_type = genomic DNA
catcaccccataaacacc

SEQ ID NO: 65101 - DNA, 19 bp, Homo sapiens
  source 1..19: mol_type = genomic DNA
catcaccccataaacacca

SEQ ID NO: 65102 - DNA, 16 bp, Homo sapiens
  source 1..16: mol_type = genomic DNA
catcagattgtgaatc

SEQ ID NO: 65103 - DNA, 17 bp, Homo sapiens
  source 1..17: mol_type = genomic DNA
catcagattgtgaatct

SEQ ID NO: 65104 - DNA, 19 bp, Homo sapiens
  source 1..19: mol_type = genomic DNA
catcagattgtgaatctga

SEQ ID NO: 65105 - DNA, 21 bp, Homo sapiens
  source 1..21: mol_type = genomic DNA
catcagattgtgaatctgaca

SEQ ID NO: 65106 - DNA, 24 bp, Homo sapiens
  source 1..24: mol_type = genomic DNA
catcagattgtgaatctgacaaca

SEQ ID NO: 65107 - DNA, 16 bp, Homo sapiens
  source 1..16: mol_type = genomic DNA
catgagactcttaatc

SEQ ID NO: 65108 - DNA, 17 bp, Homo sapiens
  source 1..17: mol_type = genomic DNA
catgagactcttaatct

SEQ ID NO: 65109 - DNA, 18 bp, Homo sapiens
  source 1..18: mol_type = genomic DNA
catgagactcttaatctc

SEQ ID NO: 65110 - DNA, 19 bp, Homo sapiens
  source 1..19: mol_type = genomic DNA
catgcccccatgtctaaca

SEQ ID NO: 65111 - DNA, 16 bp, Homo sapiens
  source 1..16: mol_type = genomic DNA
catggctttctcacca

SEQ ID NO: 65112 - DNA, 17 bp, Homo sapiens
  source 1..17: mol_type = genomic DNA
catgggactcttaatcc

SEQ ID NO: 65113 - DNA, 18 bp, Homo sapiens
  source 1..18: mol_type = genomic DNA
catgtctaacaacatggc

SEQ ID NO: 65114 - DNA, 19 bp, Homo sapiens
  source 1..19: mol_type = genomic DNA
catgtctaacaacatggct

SEQ ID NO: 65115 - DNA, 20 bp, Homo sapiens
  source 1..20: mol_type = genomic DNA
catgtctaacaacatggctt

SEQ ID NO: 65116 - DNA, 24 bp, Homo sapiens
  source 1..24: mol_type = genomic DNA
cattaaattatgataatcatattt

SEQ ID NO: 65117 - DNA, 16 bp, Homo sapiens
  source 1..16: mol_type = genomic DNA
cattaaccttttaagt

SEQ ID NO: 65118 - DNA, 17 bp, Homo sapiens
  source 1..17: mol_type = genomic DNA
cattaaccttttaagtt

SEQ ID NO: 65119 - DNA, 18 bp, Homo sapiens
  source 1..18: mol_type = genomic DNA
cattaaccttttaagtta

SEQ ID NO: 65120 - DNA, 17 bp, Homo sapiens
  source 1..17: mol_type = genomic DNA
cattcaaaaaagagtac

SEQ ID NO: 65121 - DNA, 18 bp, Homo sapiens
  source 1..18: mol_type = genomic DNA
cattcaaaaaagagtacc

SEQ ID NO: 65122 - DNA, 19 bp, Homo sapiens
  source 1..19: mol_type = genomic DNA
cattcaaaaaagagtacca

SEQ ID NO: 65123 - DNA, 18 bp, Homo sapiens
  source 1..18: mol_type = genomic DNA
cattcttgcgacccgggt

SEQ ID NO: 65124 - DNA, 19 bp, Homo sapiens
  source 1..19: mol_type = genomic DNA
cattcttgcgacccgggtt

SEQ ID NO: 65125 - DNA, 20 bp, Homo sapiens
  source 1..20: mol_type = genomic DNA
cattcttgcgacccgggttc

SEQ ID NO: 65126 - DNA, 21 bp, Homo sapiens
  source 1..21: mol_type = genomic DNA
cattcttgcgacccgggttcg

SEQ ID NO: 65127 - DNA, 22 bp, Homo sapiens
  source 1..22: mol_type = genomic DNA
cattcttgcgacccgggttcga

SEQ ID NO: 65128 - DNA, 23 bp, Homo sapiens
  source 1..23: mol_type = genomic DNA
cattcttgcgacccgggttcgat

SEQ ID NO: 65129 - DNA, 19 bp, Homo sapiens
  source 1..19: mol_type = genomic DNA
cattggggtttccccgcgc

SEQ ID NO: 65130 - DNA, 16 bp, Homo sapiens
  source 1..16: mol_type = genomic DNA
cattggtcgtggttgt

SEQ ID NO: 65131 - DNA, 17 bp, Homo sapiens
  source 1..17: mol_type = genomic DNA
cattggtcgtggttgta

SEQ ID NO: 65132 - DNA, 19 bp, Homo sapiens
  source 1..19: mol_type = genomic DNA
cattggtcgtggttgtagt

SEQ ID NO: 65133 - DNA, 20 bp, Homo sapiens
  source 1..20: mol_type = genomic DNA
cattggtcgtggttgtagtc

SEQ ID NO: 65134 - DNA, 21 bp, Homo sapiens
  source 1..21: mol_type = genomic DNA
cattggtcgtggttgtagtcc

SEQ ID NO: 65135 - DNA, 17 bp, Homo sapiens
  source 1..17: mol_type = genomic DNA
cattggtcttaggcccc

SEQ ID NO: 65136 - DNA, 18 bp, Homo sapiens
  source 1..18: mol_type = genomic DNA
cattggtcttaggcccca

SEQ ID NO: 65137 - DNA, 17 bp, Homo sapiens
  source 1..17: mol_type = genomic DNA
catttcataactttgtc

SEQ ID NO: 65138 - DNA, 21 bp, Homo sapiens
  source 1..21: mol_type = genomic DNA
ccaaaaattttggtgcaactc

SEQ ID NO: 65139 - DNA, 17 bp, Homo sapiens
  source 1..17: mol_type = genomic DNA
ccaaaacatcagattgt

SEQ ID NO: 65140 - DNA, 18 bp, Homo sapiens
  source 1..18: mol_type = genomic DNA
ccaaaacatcagattgtg

SEQ ID NO: 65141 - DNA, 19 bp, Homo sapiens
  source 1..19: mol_type = genomic DNA
ccaaaacatcagattgtga

SEQ ID NO: 65142 - DNA, 20 bp, Homo sapiens
  source 1..20: mol_type = genomic DNA
ccaaaacatcagattgtgaa

SEQ ID NO: 65143 - DNA, 21 bp, Homo sapiens
  source 1..21: mol_type = genomic DNA
ccaaaacatcagattgtgaat

SEQ ID NO: 65144 - DNA, 22 bp, Homo sapiens
  source 1..22: mol_type = genomic DNA
ccaaaacatcagattgtgaatc

SEQ ID NO: 65145 - DNA, 16 bp, Homo sapiens
  source 1..16: mol_type = genomic DNA
ccaaataaaagtacca

SEQ ID NO: 65146 - DNA, 20 bp, Homo sapiens
  source 1..20: mol_type = genomic DNA
ccaacacctctttacagtga

SEQ ID NO: 65147 - DNA, 21 bp, Homo sapiens
  source 1..21: mol_type = genomic DNA
ccaacacctctttacagtgac

SEQ ID NO: 65148 - DNA, 22 bp, Homo sapiens
  source 1..22: mol_type = genomic DNA
ccaacacctctttacagtgacc

SEQ ID NO: 65149 - DNA, 17 bp, Homo sapiens
  source 1..17: mol_type = genomic DNA
ccaacttacacttagga

SEQ ID NO: 65150 - DNA, 18 bp, Homo sapiens
  source 1..18: mol_type = genomic DNA
ccaacttacacttaggag

SEQ ID NO: 65151 - DNA, 19 bp, Homo sapiens
  source 1..19: mol_type = genomic DNA
ccaacttacacttaggaga

SEQ ID NO: 65152 - DNA, 21 bp, Homo sapiens
  source 1..21: mol_type = genomic DNA
ccaacttacacttaggagatt

SEQ ID NO: 65153 - DNA, 24 bp, Homo sapiens
  source 1..24: mol_type = genomic DNA
ccaacttacacttaggagatttca

SEQ ID NO: 65154 - DNA, 25 bp, Homo sapiens
  source 1..25: mol_type = genomic DNA
ccaacttacacttaggagatttcaa

SEQ ID NO: 65155 - DNA, 16 bp, Homo sapiens
  source 1..16: mol_type = genomic DNA
ccaaggtcgcgggttc

SEQ ID NO: 65156 - DNA, 16 bp, Homo sapiens
  source 1..16: mol_type = genomic DNA
ccacccagggacgcca

SEQ ID NO: 65157 - DNA, 17 bp, Homo sapiens
  source 1..17: mol_type = genomic DNA
ccactgtaaagctaact

SEQ ID NO: 65158 - DNA, 18 bp, Homo sapiens
  source 1..18: mol_type = genomic DNA
ccactgtaaagctaactt

SEQ ID NO: 65159 - DNA, 17 bp, Homo sapiens
  source 1..17: mol_type = genomic DNA
ccagaggtcgatggatc

SEQ ID NO: 65160 - DNA, 18 bp, Homo sapiens
  source 1..18: mol_type = genomic DNA
ccagaggtcgatggatcg

SEQ ID NO: 65161 - DNA, 17 bp, Homo sapiens
  source 1..17: mol_type = genomic DNA
ccagaggttccgggttc

SEQ ID NO: 65162 - DNA, 17 bp, Homo sapiens
  source 1..17: mol_type = genomic DNA
ccagagtgtagcttaac

SEQ ID NO: 65163 - DNA, 16 bp, Homo sapiens
  source 1..16: mol_type = genomic DNA
ccagcgatccgagttc

SEQ ID NO: 65164 - DNA, 17 bp, Homo sapiens
  source 1..17: mol_type = genomic DNA
ccagcgatccgagttca

SEQ ID NO: 65165 - DNA, 17 bp, Homo sapiens
  source 1..17: mol_type = genomic DNA
ccagggattgtgggttc

SEQ ID NO: 65166 - DNA, 18 bp, Homo sapiens
  source 1..18: mol_type = genomic DNA
ccagggattgtgggttcg

SEQ ID NO: 65167 - DNA, 17 bp, Homo sapiens
  source 1..17: mol_type = genomic DNA
ccaggggtcgcgagttc

SEQ ID NO: 65168 - DNA, 16 bp, Homo sapiens
  source 1..16: mol_type = genomic DNA
ccagggtcgtgggttc

SEQ ID NO: 65169 - DNA, 17 bp, Homo sapiens
  source 1..17: mol_type = genomic DNA
ccagggtcgtgggttcg

SEQ ID NO: 65170 - DNA, 17 bp, Homo sapiens
  source 1..17: mol_type = genomic DNA
ccagtctcttcgggggc

SEQ ID NO: 65171 - DNA, 16 bp, Homo sapiens
  source 1..16: mol_type = genomic DNA
ccagtggcgcaatgga

SEQ ID NO: 65172 - DNA, 18 bp, Homo sapiens
  source 1..18: mol_type = genomic DNA
ccataacccagaggtcga

SEQ ID NO: 65173 - DNA, 16 bp, Homo sapiens
  source 1..16: mol_type = genomic DNA
ccatcctctgctacca

SEQ ID NO: 65174 - DNA, 19 bp, Homo sapiens
  source 1..19: mol_type = genomic DNA
ccatggtgtaatggttagc

SEQ ID NO: 65175 - DNA, 20 bp, Homo sapiens
  source 1..20: mol_type = genomic DNA
ccatgtctaacaacatggct

SEQ ID NO: 65176 - DNA, 16 bp, Homo sapiens
  source 1..16: mol_type = genomic DNA
ccattggtcttaggcc

SEQ ID NO: 65177 - DNA, 18 bp, Homo sapiens
  source 1..18: mol_type = genomic DNA
ccattggtcttaggcccc

SEQ ID NO: 65178 - DNA, 19 bp, Homo sapiens
  source 1..19: mol_type = genomic DNA
ccattggtcttaggcccca

SEQ ID NO: 65179 - DNA, 19 bp, Homo sapiens
  source 1..19: mol_type = genomic DNA
cccaacttacacttaggag

SEQ ID NO: 65180 - DNA, 20 bp, Homo sapiens
  source 1..20: mol_type = genomic DNA
cccaacttacacttaggaga

SEQ ID NO: 65181 - DNA, 16 bp, Homo sapiens
  source 1..16: mol_type = genomic DNA
cccacccagggacgcc

SEQ ID NO: 65182 - DNA, 17 bp, Homo sapiens
  source 1..17: mol_type = genomic DNA
cccacccagggacgcca

SEQ ID NO: 65183 - DNA, 16 bp, Homo sapiens
  source 1..16: mol_type = genomic DNA
cccaccgctgccacca

SEQ ID NO: 65184 - DNA, 16 bp, Homo sapiens
  source 1..16: mol_type = genomic DNA
cccacgttgggcgcca

SEQ ID NO: 65185 - DNA, 16 bp, Homo sapiens
  source 1..16: mol_type = genomic DNA
cccactcctgacacca

SEQ ID NO: 65186 - DNA, 16 bp, Homo sapiens
  source 1..16: mol_type = genomic DNA
cccactcctggtacca

SEQ ID NO: 65187 - DNA, 16 bp, Homo sapiens
  source 1..16: mol_type = genomic DNA
cccacttctgacacca

SEQ ID NO: 65188 - DNA, 16 bp, Homo sapiens
  source 1..16: mol_type = genomic DNA
cccagaggtcgatgga

SEQ ID NO: 65189 - DNA, 18 bp, Homo sapiens
  source 1..18: mol_type = genomic DNA
cccagaggtcgatggatc

SEQ ID NO: 65190 - DNA, 19 bp, Homo sapiens
  source 1..19: mol_type = genomic DNA
cccagaggtcgatggatcg

SEQ ID NO: 65191 - DNA, 16 bp, Homo sapiens
  source 1..16: mol_type = genomic DNA
cccagcggggcctcca

SEQ ID NO: 65192 - DNA, 16 bp, Homo sapiens
  source 1..16: mol_type = genomic DNA
cccagcggtgcctcca

SEQ ID NO: 65193 - DNA, 16 bp, Homo sapiens
  source 1..16: mol_type = genomic DNA
cccagtggaaccacca

SEQ ID NO: 65194 - DNA, 17 bp, Homo sapiens
  source 1..17: mol_type = genomic DNA
cccagtggcctaatgga

SEQ ID NO: 65195 - DNA, 19 bp, Homo sapiens
  source 1..19: mol_type = genomic DNA
cccataacccagaggtcga

SEQ ID NO: 65196 - DNA, 17 bp, Homo sapiens
  source 1..17: mol_type = genomic DNA
cccataccccgaaaatg

SEQ ID NO: 65197 - DNA, 19 bp, Homo sapiens
  source 1..19: mol_type = genomic DNA
cccataccccgaaaatgtt

SEQ ID NO: 65198 - DNA, 20 bp, Homo sapiens
  source 1..20: mol_type = genomic DNA
cccataccccgaaaatgttg

SEQ ID NO: 65199 - DNA, 16 bp, Homo sapiens
  source 1..16: mol_type = genomic DNA
cccatcctcgtcgcca

SEQ ID NO: 65200 - DNA, 16 bp, Homo sapiens
  source 1..16: mol_type = genomic DNA
cccatgtctaacaaca

SEQ ID NO: 65201 - DNA, 20 bp, Homo sapiens
  source 1..20: mol_type = genomic DNA
cccatgtctaacaacatggc

SEQ ID NO: 65202 - DNA, 21 bp, Homo sapiens
  source 1..21: mol_type = genomic DNA
cccatgtctaacaacatggct

SEQ ID NO: 65203 - DNA, 20 bp, Homo sapiens
  source 1..20: mol_type = genomic DNA
cccattcttgcgacccgggt

SEQ ID NO: 65204 - DNA, 21 bp, Homo sapiens
  source 1..21: mol_type = genomic DNA
cccattcttgcgacccgggtt

SEQ ID NO: 65205 - DNA, 16 bp, Homo sapiens
  source 1..16: mol_type = genomic DNA
cccattggtctagcca

SEQ ID NO: 65206 - DNA, 16 bp, Homo sapiens
  source 1..16: mol_type = genomic DNA
ccccacgttgggcgcc

SEQ ID NO: 65207 - DNA, 17 bp, Homo sapiens
  source 1..17: mol_type = genomic DNA
ccccacgttgggcgcca

SEQ ID NO: 65208 - DNA, 16 bp, Homo sapiens
  source 1..16: mol_type = genomic DNA
ccccactcctggtacc

SEQ ID NO: 65209 - DNA, 17 bp, Homo sapiens
  source 1..17: mol_type = genomic DNA
ccccactcctggtacca

SEQ ID NO: 65210 - DNA, 17 bp, Homo sapiens
  source 1..17: mol_type = genomic DNA
ccccagcatctccacca

SEQ ID NO: 65211 - DNA, 17 bp, Homo sapiens
  source 1..17: mol_type = genomic DNA
ccccagtggaaccacca

SEQ ID NO: 65212 - DNA, 17 bp, Homo sapiens
  source 1..17: mol_type = genomic DNA
ccccatgtctaacaaca

SEQ ID NO: 65213 - DNA, 21 bp, Homo sapiens
  source 1..21: mol_type = genomic DNA
ccccatgtctaacaacatggc

SEQ ID NO: 65214 - DNA, 22 bp, Homo sapiens
  source 1..22: mol_type = genomic DNA
ccccatgtctaacaacatggct

SEQ ID NO: 65215 - DNA, 18 bp, Homo sapiens
  source 1..18: mol_type = genomic DNA
cccccatgtctaacaaca

SEQ ID NO: 65216 - DNA, 22 bp, Homo sapiens
  source 1..22: mol_type = genomic DNA
cccccatgtctaacaacatggc

SEQ ID NO: 65217 - DNA, 23 bp, Homo sapiens
  source 1..23: mol_type = genomic DNA
cccccatgtctaacaacatggct

SEQ ID NO: 65218 - DNA, 16 bp, Homo sapiens
  source 1..16: mol_type = genomic DNA
cccccttatttctacc

SEQ ID NO: 65219 - DNA, 17 bp, Homo sapiens
  source 1..17: mol_type = genomic DNA
cccccttatttctacca

SEQ ID NO: 65220 - DNA, 16 bp, Homo sapiens
  source 1..16: mol_type = genomic DNA
ccccgacggggagcca

SEQ ID NO: 65221 - DNA, 16 bp, Homo sapiens
  source 1..16: mol_type = genomic DNA
ccccggcacctccacc

SEQ ID NO: 65222 - DNA, 17 bp, Homo sapiens
  source 1..17: mol_type = genomic DNA
ccccggcacctccacca

SEQ ID NO: 65223 - DNA, 16 bp, Homo sapiens
  source 1..16: mol_type = genomic DNA
ccccggcatctccacc

SEQ ID NO: 65224 - DNA, 17 bp, Homo sapiens
  source 1..17: mol_type = genomic DNA
ccccggcatctccacca

SEQ ID NO: 65225 - DNA, 16 bp, Homo sapiens
  source 1..16: mol_type = genomic DNA
ccccgtacgggccacc

SEQ ID NO: 65226 - DNA, 17 bp, Homo sapiens
  source 1..17: mol_type = genomic DNA
ccccgtacgggccacca

SEQ ID NO: 65227 - DNA, 16 bp, Homo sapiens
  source 1..16: mol_type = genomic DNA
ccccttatttacccca

SEQ ID NO: 65228 - DNA, 16 bp, Homo sapiens
  source 1..16: mol_type = genomic DNA
ccccttatttctacca

SEQ ID NO: 65229 - DNA, 16 bp, Homo sapiens
  source 1..16: mol_type = genomic DNA
cccgaaaatgttggtt

SEQ ID NO: 65230 - DNA, 17 bp, Homo sapiens
  source 1..17: mol_type = genomic DNA
cccgaaaatgttggtta

SEQ ID NO: 65231 - DNA, 18 bp, Homo sapiens
  source 1..18: mol_type = genomic DNA
cccgaaaatgttggttat

SEQ ID NO: 65232 - DNA, 16 bp, Homo sapiens
  source 1..16: mol_type = genomic DNA
cccgcatcctccacca

SEQ ID NO: 65233 - DNA, 16 bp, Homo sapiens
  source 1..16: mol_type = genomic DNA
cccggacgagccccca

SEQ ID NO: 65234 - DNA, 18 bp, Homo sapiens
  source 1..18: mol_type = genomic DNA
cccggatagctcagtcgg

SEQ ID NO: 65235 - DNA, 16 bp, Homo sapiens
  source 1..16: mol_type = genomic DNA
cccggcacctccacca

SEQ ID NO: 65236 - DNA, 16 bp, Homo sapiens
  source 1..16: mol_type = genomic DNA
cccggcatctccacca

SEQ ID NO: 65237 - DNA, 16 bp, Homo sapiens
  source 1..16: mol_type = genomic DNA
cccggccaacgcacca

SEQ ID NO: 65238 - DNA, 16 bp, Homo sapiens
  source 1..16: mol_type = genomic DNA
cccggccaatgcacca

SEQ ID NO: 65239 - DNA, 16 bp, Homo sapiens
  source 1..16: mol_type = genomic DNA
cccggcccatgcacca

SEQ ID NO: 65240 - DNA, 16 bp, Homo sapiens
  source 1..16: mol_type = genomic DNA
cccggcggagtcgcca

SEQ ID NO: 65241 - DNA, 18 bp, Homo sapiens
  source 1..18: mol_type = genomic DNA
cccggctagctcagtcgg

SEQ ID NO: 65242 - DNA, 17 bp, Homo sapiens
  source 1..17: mol_type = genomic DNA
cccgggcggaaacacca

SEQ ID NO: 65243 - DNA, 16 bp, Homo sapiens
  source 1..16: mol_type = genomic DNA
cccgggcggcgcacca

SEQ ID NO: 65244 - DNA, 16 bp, Homo sapiens
  source 1..16: mol_type = genomic DNA
cccgggtttcggcacc

SEQ ID NO: 65245 - DNA, 17 bp, Homo sapiens
  source 1..17: mol_type = genomic DNA
cccgggtttcggcacca

SEQ ID NO: 65246 - DNA, 19 bp, Homo sapiens
  source 1..19: mol_type = genomic DNA
cccggtaatcgcataaaac

SEQ ID NO: 65247 - DNA, 16 bp, Homo sapiens
  source 1..16: mol_type = genomic DNA
cccggtatgggaacca

SEQ ID NO: 65248 - DNA, 16 bp, Homo sapiens
  source 1..16: mol_type = genomic DNA
cccggtcagggaacca

SEQ ID NO: 65249 - DNA, 16 bp, Homo sapiens
  source 1..16: mol_type = genomic DNA
cccggtgtgggaacca

SEQ ID NO: 65250 - DNA, 16 bp, Homo sapiens
  source 1..16: mol_type = genomic DNA
cccgtacgggccacca

SEQ ID NO: 65251 - DNA, 16 bp, Homo sapiens
  source 1..16: mol_type = genomic DNA
ccctcagtaagttgca

SEQ ID NO: 65252 - DNA, 20 bp, Homo sapiens
  source 1..20: mol_type = genomic DNA
ccctcagtaagttgcaatac

SEQ ID NO: 65253 - DNA, 17 bp, Homo sapiens
  source 1..17: mol_type = genomic DNA
ccctgctcgctgcgcca

SEQ ID NO: 65254 - DNA, 18 bp, Homo sapiens
  source 1..18: mol_type = genomic DNA
ccctggtggtctagtggc

SEQ ID NO: 65255 - DNA, 16 bp, Homo sapiens
  source 1..16: mol_type = genomic DNA
ccctgttcgggcgcca

SEQ ID NO: 65256 - DNA, 16 bp, Homo sapiens
  source 1..16: mol_type = genomic DNA
cccttcccgtactacc

SEQ ID NO: 65257 - DNA, 17 bp, Homo sapiens
  source 1..17: mol_type = genomic DNA
cccttcccgtactacca

SEQ ID NO: 65258 - DNA, 16 bp, Homo sapiens
  source 1..16: mol_type = genomic DNA
cccttcgtggtcgcca

SEQ ID NO: 65259 - DNA, 17 bp, Homo sapiens
  source 1..17: mol_type = genomic DNA
ccgaaaatgttggttat

SEQ ID NO: 65260 - DNA, 19 bp, Homo sapiens
  source 1..19: mol_type = genomic DNA
ccgaaaatgttggttatac

SEQ ID NO: 65261 - DNA, 20 bp, Homo sapiens
  source 1..20: mol_type = genomic DNA
ccgaaaatgttggttatacc

SEQ ID NO: 65262 - DNA, 21 bp, Homo sapiens
  source 1..21: mol_type = genomic DNA
ccgaaaatgttggttataccc

SEQ ID NO: 65263 - DNA, 18 bp, Homo sapiens
  source 1..18: mol_type = genomic DNA
ccgaaaggttggtggttc

SEQ ID NO: 65264 - DNA, 17 bp, Homo sapiens
  source 1..17: mol_type = genomic DNA
ccgaagatcgcgggttc

SEQ ID NO: 65265 - DNA, 19 bp, Homo sapiens
  source 1..19: mol_type = genomic DNA
ccgaggtgattttcatatt

SEQ ID NO: 65266 - DNA, 20 bp, Homo sapiens
  source 1..20: mol_type = genomic DNA
ccgaggtgattttcatattg

SEQ ID NO: 65267 - DNA, 16 bp, Homo sapiens
  source 1..16: mol_type = genomic DNA
ccgaggttgtgagttc

SEQ ID NO: 65268 - DNA, 16 bp, Homo sapiens
  source 1..16: mol_type = genomic DNA
ccgagtcacggcacca

SEQ ID NO: 65269 - DNA, 18 bp, Homo sapiens
  source 1..18: mol_type = genomic DNA
ccgcagcaacctcggttc

SEQ ID NO: 65270 - DNA, 22 bp, Homo sapiens
  source 1..22: mol_type = genomic DNA
ccgcgcaggttcgaatcctgcc

SEQ ID NO: 65271 - DNA, 16 bp, Homo sapiens
  source 1..16: mol_type = genomic DNA
ccgcggcccgggttcg

SEQ ID NO: 65272 - DNA, 17 bp, Homo sapiens
  source 1..17: mol_type = genomic DNA
ccgcgtggcctaatgga

SEQ ID NO: 65273 - DNA, 18 bp, Homo sapiens
  source 1..18: mol_type = genomic DNA
ccgctggtgtagtggtat

SEQ ID NO: 65274 - DNA, 19 bp, Homo sapiens
  source 1..19: mol_type = genomic DNA
ccgctggtgtagtggtatc

SEQ ID NO: 65275 - DNA, 20 bp, Homo sapiens
  source 1..20: mol_type = genomic DNA
ccgctggtgtagtggtatca

SEQ ID NO: 65276 - DNA, 21 bp, Homo sapiens
  source 1..21: mol_type = genomic DNA
ccgctggtgtagtggtatcat

SEQ ID NO: 65277 - DNA, 22 bp, Homo sapiens
  source 1..22: mol_type = genomic DNA
ccgctggtgtagtggtatcatg

SEQ ID NO: 65278 - DNA, 23 bp, Homo sapiens
  source 1..23: mol_type = genomic DNA
ccgctggtgtagtggtatcatgc

SEQ ID NO: 65279 - DNA, 24 bp, Homo sapiens
  source 1..24: mol_type = genomic DNA
ccgctggtgtagtggtatcatgca

SEQ ID NO: 65280 - DNA, 25 bp, Homo sapiens
  source 1..25: mol_type = genomic DNA
ccgctggtgtagtggtatcatgcaa

SEQ ID NO: 65281 - DNA, 16 bp, Homo sapiens
  source 1..16: mol_type = genomic DNA
ccggagatgaaaacct

SEQ ID NO: 65282 - DNA, 17 bp, Homo sapiens
  source 1..17: mol_type = genomic DNA
ccggagatgaaaacctt

SEQ ID NO: 65283 - DNA, 18 bp, Homo sapiens
  source 1..18: mol_type = genomic DNA
ccggagatgaaaaccttt

SEQ ID NO: 65284 - DNA, 19 bp, Homo sapiens
  source 1..19: mol_type = genomic DNA
ccggagatgaaaacctttt

SEQ ID NO: 65285 - DNA, 20 bp, Homo sapiens
  source 1..20: mol_type = genomic DNA
ccggagatgaaaaccttttt

SEQ ID NO: 65286 - DNA, 21 bp, Homo sapiens
  source 1..21: mol_type = genomic DNA
ccggagatgaaaacctttttc

SEQ ID NO: 65287 - DNA, 22 bp, Homo sapiens
  source 1..22: mol_type = genomic DNA
ccggagatgaaaacctttttcc

SEQ ID NO: 65288 - DNA, 25 bp, Homo sapiens
  source 1..25: mol_type = genomic DNA
ccggagatgaaaacctttttccaag

SEQ ID NO: 65289 - DNA, 16 bp, Homo sapiens
  source 1..16: mol_type = genomic DNA
ccggatagctcagtcg

SEQ ID NO: 65290 - DNA, 17 bp, Homo sapiens
  source 1..17: mol_type = genomic DNA
ccggatagctcagtcgg

SEQ ID NO: 65291 - DNA, 19 bp, Homo sapiens
  source 1..19: mol_type = genomic DNA
ccggatagctcagtcggta

SEQ ID NO: 65292 - DNA, 20 bp, Homo sapiens
  source 1..20: mol_type = genomic DNA
ccggatagctcagtcggtag

SEQ ID NO: 65293 - DNA, 21 bp, Homo sapiens
  source 1..21: mol_type = genomic DNA
ccggatagctcagtcggtaga

SEQ ID NO: 65294 - DNA, 22 bp, Homo sapiens
  source 1..22: mol_type = genomic DNA
ccggatagctcagtcggtagag

SEQ ID NO: 65295 - DNA, 23 bp, Homo sapiens
  source 1..23: mol_type = genomic DNA
ccggatagctcagtcggtagagc

SEQ ID NO: 65296 - DNA, 24 bp, Homo sapiens
  source 1..24: mol_type = genomic DNA
ccggatagctcagtcggtagagca

SEQ ID NO: 65297 - DNA, 25 bp, Homo sapiens
  source 1..25: mol_type = genomic DNA
ccggatagctcagtcggtagagcat

SEQ ID NO: 65298 - DNA, 17 bp, Homo sapiens
  source 1..17: mol_type = genomic DNA
ccggatcagaagattga

SEQ ID NO: 65299 - DNA, 18 bp, Homo sapiens
  source 1..18: mol_type = genomic DNA
ccggatggaggcgtgggt

SEQ ID NO: 65300 - DNA, 19 bp, Homo sapiens
  source 1..19: mol_type = genomic DNA
ccggatggaggcgtgggtt

SEQ ID NO: 65301 - DNA, 17 bp, Homo sapiens
  source 1..17: mol_type = genomic DNA
ccggctagctcagtcgg

SEQ ID NO: 65302 - DNA, 21 bp, Homo sapiens
  source 1..21: mol_type = genomic DNA
ccggctagctcagtcggtaga

SEQ ID NO: 65303 - DNA, 22 bp, Homo sapiens
  source 1..22: mol_type = genomic DNA
ccggctagctcagtcggtagag

SEQ ID NO: 65304 - DNA, 23 bp, Homo sapiens
  source 1..23: mol_type = genomic DNA
ccggctagctcagtcggtagagc

SEQ ID NO: 65305 - DNA, 24 bp, Homo sapiens
  source 1..24: mol_type = genomic DNA
ccggctagctcagtcggtagagca

SEQ ID NO: 65306 - DNA, 16 bp, Homo sapiens
  source 1..16: mol_type = genomic DNA
ccggctcgaaggacca

SEQ ID NO: 65307 - DNA, 16 bp, Homo sapiens
  source 1..16: mol_type = genomic DNA
ccggctcggaggacca

SEQ ID NO: 65308 - DNA, 16 bp, Homo sapiens
  source 1..16: mol_type = genomic DNA
ccgggcggaaacacca

SEQ ID NO: 65309 - DNA, 16 bp, Homo sapiens
  source 1..16: mol_type = genomic DNA
ccgggtgccccctcca

SEQ ID NO: 65310 - DNA, 16 bp, Homo sapiens
  source 1..16: mol_type = genomic DNA
ccgggtttcggcacca

SEQ ID NO: 65311 - DNA, 18 bp, Homo sapiens
  source 1..18: mol_type = genomic DNA
ccggtaatcgcataaaac

SEQ ID NO: 65312 - DNA, 17 bp, Homo sapiens
  source 1..17: mol_type = genomic DNA
ccggttagctcagttgg

SEQ ID NO: 65313 - DNA, 19 bp, Homo sapiens
  source 1..19: mol_type = genomic DNA
ccgtagtgtagtggttatc

SEQ ID NO: 65314 - DNA, 20 bp, Homo sapiens
  source 1..20: mol_type = genomic DNA
ccgtagtgtagtggttatca

SEQ ID NO: 65315 - DNA, 16 bp, Homo sapiens
  source 1..16: mol_type = genomic DNA
ccgtgcgagaatacca

SEQ ID NO: 65316 - DNA, 20 bp, Homo sapiens
  source 1..20: mol_type = genomic DNA
ccgttaacttccaattaact

SEQ ID NO: 65317 - DNA, 16 bp, Homo sapiens
  source 1..16: mol_type = genomic DNA
cctatatatcttacca

SEQ ID NO: 65318 - DNA, 17 bp, Homo sapiens
  source 1..17: mol_type = genomic DNA
cctcacacggggcacca

SEQ ID NO: 65319 - DNA, 17 bp, Homo sapiens
  source 1..17: mol_type = genomic DNA
cctcacctggagcacca

SEQ ID NO: 65320 - DNA, 17 bp, Homo sapiens
  source 1..17: mol_type = genomic DNA
cctcagagggggcacca

SEQ ID NO: 65321 - DNA, 19 bp, Homo sapiens
  source 1..19: mol_type = genomic DNA
cctcagtaagttgcaatac

SEQ ID NO: 65322 - DNA, 16 bp, Homo sapiens
  source 1..16: mol_type = genomic DNA
cctcctcaaagcaata

SEQ ID NO: 65323 - DNA, 17 bp, Homo sapiens
  source 1..17: mol_type = genomic DNA
cctcctcaaagcaatac

SEQ ID NO: 65324 - DNA, 18 bp, Homo sapiens
  source 1..18: mol_type = genomic DNA
cctcctcaaagcaataca

SEQ ID NO: 65325 - DNA, 20 bp, Homo sapiens
  source 1..20: mol_type = genomic DNA
cctcctcaaagcaatacact

SEQ ID NO: 65326 - DNA, 18 bp, Homo sapiens
  source 1..18: mol_type = genomic DNA
cctcgttagcgcagtagg

SEQ ID NO: 65327 - DNA, 16 bp, Homo sapiens
  source 1..16: mol_type = genomic DNA
cctcttcttaacacca

SEQ ID NO: 65328 - DNA, 16 bp, Homo sapiens
  source 1..16: mol_type = genomic DNA
cctctttacagtgacc

SEQ ID NO: 65329 - DNA, 17 bp, Homo sapiens
  source 1..17: mol_type = genomic DNA
cctctttacagtgacca

SEQ ID NO: 65330 - DNA, 16 bp, Homo sapiens
  source 1..16: mol_type = genomic DNA
cctctttttaccacca

SEQ ID NO: 65331 - DNA, 16 bp, Homo sapiens
  source 1..16: mol_type = genomic DNA
cctgccgactacgcca

SEQ ID NO: 65332 - DNA, 16 bp, Homo sapiens
  source 1..16: mol_type = genomic DNA
cctgctcacagcgcca

SEQ ID NO: 65333 - DNA, 16 bp, Homo sapiens
  source 1..16: mol_type = genomic DNA
cctgctcgctgcgcca

SEQ ID NO: 65334 - DNA, 16 bp, Homo sapiens
  source 1..16: mol_type = genomic DNA
cctggctggctcgcca

SEQ ID NO: 65335 - DNA, 20 bp, Homo sapiens
  source 1..20: mol_type = genomic DNA
cctgggttcgaatcccagcg

SEQ ID NO: 65336 - DNA, 17 bp, Homo sapiens
  source 1..17: mol_type = genomic DNA
cctggtggtctagtggc

SEQ ID NO: 65337 - DNA, 20 bp, Homo sapiens
  source 1..20: mol_type = genomic DNA
cctggtggtctagtggttag

SEQ ID NO: 65338 - DNA, 22 bp, Homo sapiens
  source 1..22: mol_type = genomic DNA
cctggtggtctagtggttagga

SEQ ID NO: 65339 - DNA, 23 bp, Homo sapiens
  source 1..23: mol_type = genomic DNA
cctggtggtctagtggttaggat

SEQ ID NO: 65340 - DNA, 25 bp, Homo sapiens
  source 1..25: mol_type = genomic DNA
cctggtggtctagtggttaggattc

SEQ ID NO: 65341 - DNA, 16 bp, Homo sapiens
  source 1..16: mol_type = genomic DNA
cctgtcacgcgggaga

SEQ ID NO: 65342 - DNA, 16 bp, Homo sapiens
  source 1..16: mol_type = genomic DNA
cctgttcgtgacgcca

SEQ ID NO: 65343 - DNA, 19 bp, Homo sapiens
  source 1..19: mol_type = genomic DNA
ccttccaagcagttgaccc

SEQ ID NO: 65344 - DNA, 16 bp, Homo sapiens
  source 1..16: mol_type = genomic DNA
ccttcccgtactacca

SEQ ID NO: 65345 - DNA, 16 bp, Homo sapiens
  source 1..16: mol_type = genomic DNA
ccttcgatagctcagc

SEQ ID NO: 65346 - DNA, 17 bp, Homo sapiens
  source 1..17: mol_type = genomic DNA
ccttcgatagctcagct

SEQ ID NO: 65347 - DNA, 19 bp, Homo sapiens
  source 1..19: mol_type = genomic DNA
ccttcgatagctcagctgg

SEQ ID NO: 65348 - DNA, 19 bp, Homo sapiens
  source 1..19: mol_type = genomic DNA
ccttcgatagctcagttgg

SEQ ID NO: 65349 - DNA, 20 bp, Homo sapiens
  source 1..20: mol_type = genomic DNA
ccttcgatagctcagttggt

SEQ ID NO: 65350 - DNA, 22 bp, Homo sapiens
  source 1..22: mol_type = genomic DNA
ccttttaagttaaagattaaga

SEQ ID NO: 65351 - DNA, 25 bp, Homo sapiens
  source 1..25: mol_type = genomic DNA
ccttttaagttaaagattaagagaa

SEQ ID NO: 65352 - DNA, 18 bp, Homo sapiens
  source 1..18: mol_type = genomic DNA
cctttttccaaggacacc

SEQ ID NO: 65353 - DNA, 19 bp, Homo sapiens
  source 1..19: mol_type = genomic DNA
cctttttccaaggacacca

SEQ ID NO: 65354 - DNA, 16 bp, Homo sapiens
  source 1..16: mol_type = genomic DNA
cgaaaatgttggttat

SEQ ID NO: 65355 - DNA, 17 bp, Homo sapiens
  source 1..17: mol_type = genomic DNA
cgaaaatgttggttata

SEQ ID NO: 65356 - DNA, 18 bp, Homo sapiens
  source 1..18: mol_type = genomic DNA
cgaaaatgttggttatac

SEQ ID NO: 65357 - DNA, 19 bp, Homo sapiens
  source 1..19: mol_type = genomic DNA
cgaaaatgttggttatacc

SEQ ID NO: 65358 - DNA, 20 bp, Homo sapiens
  source 1..20: mol_type = genomic DNA
cgaaaatgttggttataccc

SEQ ID NO: 65359 - DNA, 23 bp, Homo sapiens
  source 1..23: mol_type = genomic DNA
cgaaaatgttggttatacccttc

SEQ ID NO: 65360 - DNA, 20 bp, Homo sapiens
  source 1..20: mol_type = genomic DNA
cgaaaccatcctctgctacc

SEQ ID NO: 65361 - DNA, 21 bp, Homo sapiens
  source 1..21: mol_type = genomic DNA
cgaaaccatcctctgctacca

SEQ ID NO: 65362 - DNA, 20 bp, Homo sapiens
  source 1..20: mol_type = genomic DNA
cgaaaccgggcggaaacacc

SEQ ID NO: 65363 - DNA, 21 bp, Homo sapiens
  source 1..21: mol_type = genomic DNA
cgaaaccgggcggaaacacca

SEQ ID NO: 65364 - DNA, 20 bp, Homo sapiens
  source 1..20: mol_type = genomic DNA
cgaatcccaccgctgccacc

SEQ ID NO: 65365 - DNA, 21 bp, Homo sapiens
  source 1..21: mol_type = genomic DNA
cgaatcccaccgctgccacca

SEQ ID NO: 65366 - DNA, 20 bp, Homo sapiens
  source 1..20: mol_type = genomic DNA
cgaatcccactcctgacacc

SEQ ID NO: 65367 - DNA, 20 bp, Homo sapiens
  source 1..20: mol_type = genomic DNA
cgaatcccacttctgacacc

SEQ ID NO: 65368 - DNA, 21 bp, Homo sapiens
  source 1..21: mol_type = genomic DNA
cgaatcccacttctgacacca

SEQ ID NO: 65369 - DNA, 20 bp, Homo sapiens
  source 1..20: mol_type = genomic DNA
cgaatcccagcggtgcctcc

SEQ ID NO: 65370 - DNA, 21 bp, Homo sapiens
  source 1..21: mol_type = genomic DNA
cgaatcccatcctcgtcgcca

SEQ ID NO: 65371 - DNA, 18 bp, Homo sapiens
  source 1..18: mol_type = genomic DNA
cgaatccgagtcacggca

SEQ ID NO: 65372 - DNA, 19 bp, Homo sapiens
  source 1..19: mol_type = genomic DNA
cgaatccgagtcacggcac

SEQ ID NO: 65373 - DNA, 20 bp, Homo sapiens
  source 1..20: mol_type = genomic DNA
cgaatccgagtcacggcacc

SEQ ID NO: 65374 - DNA, 21 bp, Homo sapiens
  source 1..21: mol_type = genomic DNA
cgaatccgagtcacggcacca

SEQ ID NO: 65375 - DNA, 21 bp, Homo sapiens
  source 1..21: mol_type = genomic DNA
cgaatccggctcgaaggacca

SEQ ID NO: 65376 - DNA, 20 bp, Homo sapiens
  source 1..20: mol_type = genomic DNA
cgaatcctgccgactacgcc

SEQ ID NO: 65377 - DNA, 21 bp, Homo sapiens
  source 1..21: mol_type = genomic DNA
cgaatcctgccgactacgcca

SEQ ID NO: 65378 - DNA, 17 bp, Homo sapiens
  source 1..17: mol_type = genomic DNA
cgaatgatttcgactca

SEQ ID NO: 65379 - DNA, 18 bp, Homo sapiens
  source 1..18: mol_type = genomic DNA
cgaatgatttcgactcat

SEQ ID NO: 65380 - DNA, 19 bp, Homo sapiens
  source 1..19: mol_type = genomic DNA
cgaatgatttcgactcatt

SEQ ID NO: 65381 - DNA, 21 bp, Homo sapiens
  source 1..21: mol_type = genomic DNA
cgaatgatttcgactcattaa

SEQ ID NO: 65382 - DNA, 23 bp, Homo sapiens
  source 1..23: mol_type = genomic DNA
cgaatgatttcgactcattaaat

SEQ ID NO: 65383 - DNA, 17 bp, Homo sapiens
  source 1..17: mol_type = genomic DNA
cgaccccttatttaccc

SEQ ID NO: 65384 - DNA, 18 bp, Homo sapiens
  source 1..18: mol_type = genomic DNA
cgaccccttatttacccc

SEQ ID NO: 65385 - DNA, 19 bp, Homo sapiens
  source 1..19: mol_type = genomic DNA
cgaccccttatttacccca

SEQ ID NO: 65386 - DNA, 20 bp, Homo sapiens
  source 1..20: mol_type = genomic DNA
cgaccgcgtggcctaatgga

SEQ ID NO: 65387 - DNA, 19 bp, Homo sapiens
  source 1..19: mol_type = genomic DNA
cgactcccggtgtgggaac

SEQ ID NO: 65388 - DNA, 20 bp, Homo sapiens
  source 1..20: mol_type = genomic DNA
cgactcccggtgtgggaacc

SEQ ID NO: 65389 - DNA, 21 bp, Homo sapiens
  source 1..21: mol_type = genomic DNA
cgactcccggtgtgggaacca

SEQ ID NO: 65390 - DNA, 20 bp, Homo sapiens
  source 1..20: mol_type = genomic DNA
cgactcctggctggctcgcc

SEQ ID NO: 65391 - DNA, 19 bp, Homo sapiens
  source 1..19: mol_type = genomic DNA
cgagaaagctcacaagaac

SEQ ID NO: 65392 - DNA, 20 bp, Homo sapiens
  source 1..20: mol_type = genomic DNA
cgagaaagctcacaagaact

SEQ ID NO: 65393 - DNA, 17 bp, Homo sapiens
  source 1..17: mol_type = genomic DNA
cgagaggtcccgggttc

SEQ ID NO: 65394 - DNA, 20 bp, Homo sapiens
  source 1..20: mol_type = genomic DNA
cgagcccacccagggacgcc

SEQ ID NO: 65395 - DNA, 21 bp, Homo sapiens
  source 1..21: mol_type = genomic DNA
cgagcccacccagggacgcca

SEQ ID NO: 65396 - DNA, 20 bp, Homo sapiens
  source 1..20: mol_type = genomic DNA
cgagtcccatctggggtgcc

SEQ ID NO: 65397 - DNA, 21 bp, Homo sapiens
  source 1..21: mol_type = genomic DNA
cgatccccggcatctccacca

SEQ ID NO: 65398 - DNA, 20 bp, Homo sapiens
  source 1..20: mol_type = genomic DNA
cgatccccgtacgggccacc

SEQ ID NO: 65399 - DNA, 20 bp, Homo sapiens
  source 1..20: mol_type = genomic DNA
cgatcccgggtttcggcacc

SEQ ID NO: 65400 - DNA, 19 bp, Homo sapiens
  source 1..19: mol_type = genomic DNA
cgattccccgacggggagc

SEQ ID NO: 65401 - DNA, 20 bp, Homo sapiens
  source 1..20: mol_type = genomic DNA
cgattccccgacggggagcc

SEQ ID NO: 65402 - DNA, 21 bp, Homo sapiens
  source 1..21: mol_type = genomic DNA
cgattccccgacggggagcca

SEQ ID NO: 65403 - DNA, 20 bp, Homo sapiens
  source 1..20: mol_type = genomic DNA
cgattcccggccaacgcacc

SEQ ID NO: 65404 - DNA, 21 bp, Homo sapiens
  source 1..21: mol_type = genomic DNA
cgattcccggccaacgcacca

SEQ ID NO: 65405 - DNA, 20 bp, Homo sapiens
  source 1..20: mol_type = genomic DNA
cgattcccggccaatgcacc

SEQ ID NO: 65406 - DNA, 21 bp, Homo sapiens
  source 1..21: mol_type = genomic DNA
cgattcccgggcggcgcacca

SEQ ID NO: 65407 - DNA, 20 bp, Homo sapiens
  source 1..20: mol_type = genomic DNA
cgattcccggtcagggaacc

SEQ ID NO: 65408 - DNA, 20 bp, Homo sapiens
  source 1..20: mol_type = genomic DNA
cgattccggctcgaaggacc

SEQ ID NO: 65409 - DNA, 21 bp, Homo sapiens
  source 1..21: mol_type = genomic DNA
cgattccggctcgaaggacca

SEQ ID NO: 65410 - DNA, 19 bp, Homo sapiens
  source 1..19: mol_type = genomic DNA
cgattctcatagtcctagc

SEQ ID NO: 65411 - DNA, 20 bp, Homo sapiens
  source 1..20: mol_type = genomic DNA
cgattctcatagtcctagcc

SEQ ID NO: 65412 - DNA, 21 bp, Homo sapiens
  source 1..21: mol_type = genomic DNA
cgattctcatagtcctagcca

SEQ ID NO: 65413 - DNA, 17 bp, Homo sapiens
  source 1..17: mol_type = genomic DNA
cgcagcaacctcggttc

SEQ ID NO: 65414 - DNA, 17 bp, Homo sapiens
  source 1..17: mol_type = genomic DNA
cgcataaaacttaaaac

SEQ ID NO: 65415 - DNA, 19 bp, Homo sapiens
  source 1..19: mol_type = genomic DNA
cgcataaaacttaaaactt

SEQ ID NO: 65416 - DNA, 20 bp, Homo sapiens
  source 1..20: mol_type = genomic DNA
cgcataaaacttaaaacttt

SEQ ID NO: 65417 - DNA, 18 bp, Homo sapiens
  source 1..18: mol_type = genomic DNA
cgccaaggtcgcgggttc

SEQ ID NO: 65418 - DNA, 20 bp, Homo sapiens
  source 1..20: mol_type = genomic DNA
cgcccggatagctcagtcgg

SEQ ID NO: 65419 - DNA, 16 bp, Homo sapiens
  source 1..16: mol_type = genomic DNA
cgcgtggcctaatgga

SEQ ID NO: 65420 - DNA, 18 bp, Homo sapiens
  source 1..18: mol_type = genomic DNA
cgctggtgtagtggtatc

SEQ ID NO: 65421 - DNA, 25 bp, Homo sapiens
  source 1..25: mol_type = genomic DNA
cgctggtgtagtggtatcatgcaag

SEQ ID NO: 65422 - DNA, 16 bp, Homo sapiens
  source 1..16: mol_type = genomic DNA
cggaagcgtgctgggc

SEQ ID NO: 65423 - DNA, 17 bp, Homo sapiens
  source 1..17: mol_type = genomic DNA
cggaagcgtgctgggcc

SEQ ID NO: 65424 - DNA, 18 bp, Homo sapiens
  source 1..18: mol_type = genomic DNA
cggaagcgtgctgggccc

SEQ ID NO: 65425 - DNA, 17 bp, Homo sapiens
  source 1..17: mol_type = genomic DNA
cggagaattttggattc

SEQ ID NO: 65426 - DNA, 16 bp, Homo sapiens
  source 1..16: mol_type = genomic DNA
cggagatgaaaacctt

SEQ ID NO: 65427 - DNA, 17 bp, Homo sapiens
  source 1..17: mol_type = genomic DNA
cggagatgaaaaccttt

SEQ ID NO: 65428 - DNA, 18 bp, Homo sapiens
  source 1..18: mol_type = genomic DNA
cggagatgaaaacctttt

SEQ ID NO: 65429 - DNA, 19 bp, Homo sapiens
  source 1..19: mol_type = genomic DNA
cggagatgaaaaccttttt

SEQ ID NO: 65430 - DNA, 20 bp, Homo sapiens
  source 1..20: mol_type = genomic DNA
cggagatgaaaacctttttc

SEQ ID NO: 65431 - DNA, 21 bp, Homo sapiens
  source 1..21: mol_type = genomic DNA
cggagatgaaaacctttttcc

SEQ ID NO: 65432 - DNA, 22 bp, Homo sapiens
  source 1..22: mol_type = genomic DNA
cggagatgaaaacctttttcca

SEQ ID NO: 65433 - DNA, 24 bp, Homo sapiens
  source 1..24: mol_type = genomic DNA
cggagatgaaaacctttttccaag

SEQ ID NO: 65434 - DNA, 25 bp, Homo sapiens
  source 1..25: mol_type = genomic DNA
cggagatgaaaacctttttccaagg

SEQ ID NO: 65435 - DNA, 16 bp, Homo sapiens
  source 1..16: mol_type = genomic DNA
cggatagctcagtcgg

SEQ ID NO: 65436 - DNA, 18 bp, Homo sapiens
  source 1..18: mol_type = genomic DNA
cggatagctcagtcggta

SEQ ID NO: 65437 - DNA, 19 bp, Homo sapiens
  source 1..19: mol_type = genomic DNA
cggatagctcagtcggtag

SEQ ID NO: 65438 - DNA, 20 bp, Homo sapiens
  source 1..20: mol_type = genomic DNA
cggatagctcagtcggtaga

SEQ ID NO: 65439 - DNA, 22 bp, Homo sapiens
  source 1..22: mol_type = genomic DNA
cggatagctcagtcggtagagc

SEQ ID NO: 65440 - DNA, 24 bp, Homo sapiens
  source 1..24: mol_type = genomic DNA
cggatagctcagtcggtagagcat

SEQ ID NO: 65441 - DNA, 25 bp, Homo sapiens
  source 1..25: mol_type = genomic DNA
cggatagctcagtcggtagagcatc

SEQ ID NO: 65442 - DNA, 16 bp, Homo sapiens
  source 1..16: mol_type = genomic DNA
cggatcagaagattga

SEQ ID NO: 65443 - DNA, 17 bp, Homo sapiens
  source 1..17: mol_type = genomic DNA
cggatcagaagattgag

SEQ ID NO: 65444 - DNA, 16 bp, Homo sapiens
  source 1..16: mol_type = genomic DNA
cggatggaggcgtggg

SEQ ID NO: 65445 - DNA, 17 bp, Homo sapiens
  source 1..17: mol_type = genomic DNA
cggatggaggcgtgggt

SEQ ID NO: 65446 - DNA, 18 bp, Homo sapiens
  source 1..18: mol_type = genomic DNA
cggatggaggcgtgggtt

SEQ ID NO: 65447 - DNA, 16 bp, Homo sapiens
  source 1..16: mol_type = genomic DNA
cggctagctcagtcgg

SEQ ID NO: 65448 - DNA, 18 bp, Homo sapiens
  source 1..18: mol_type = genomic DNA
cggctagctcagtcggta

SEQ ID NO: 65449 - DNA, 19 bp, Homo sapiens
  source 1..19: mol_type = genomic DNA
cggctagctcagtcggtag

SEQ ID NO: 65450 - DNA, 20 bp, Homo sapiens
  source 1..20: mol_type = genomic DNA
cggctagctcagtcggtaga

SEQ ID NO: 65451 - DNA, 25 bp, Homo sapiens
  source 1..25: mol_type = genomic DNA
cggctagctcagtcggtagagcatg

SEQ ID NO: 65452 - DNA, 20 bp, Homo sapiens
  source 1..20: mol_type = genomic DNA
cggctccgtggcgcaatgga

SEQ ID NO: 65453 - DNA, 20 bp, Homo sapiens
  source 1..20: mol_type = genomic DNA
cggctctgtggcgcaatgga

SEQ ID NO: 65454 - DNA, 20 bp, Homo sapiens
  source 1..20: mol_type = genomic DNA
cgggccagtggcgcaatgga

SEQ ID NO: 65455 - DNA, 17 bp, Homo sapiens
  source 1..17: mol_type = genomic DNA
cgggcccataccccgaa

SEQ ID NO: 65456 - DNA, 16 bp, Homo sapiens
  source 1..16: mol_type = genomic DNA
cgggctcacatcaccc

SEQ ID NO: 65457 - DNA, 17 bp, Homo sapiens
  source 1..17: mol_type = genomic DNA
cgggttcaaatcccgga

SEQ ID NO: 65458 - DNA, 17 bp, Homo sapiens
  source 1..17: mol_type = genomic DNA
cggtaatcgcataaaac

SEQ ID NO: 65459 - DNA, 16 bp, Homo sapiens
  source 1..16: mol_type = genomic DNA
cggtagagcatcagac

SEQ ID NO: 65460 - DNA, 17 bp, Homo sapiens
  source 1..17: mol_type = genomic DNA
cggtagagcatcagact

SEQ ID NO: 65461 - DNA, 20 bp, Homo sapiens
  source 1..20: mol_type = genomic DNA
cggtagagcatcagactttt

SEQ ID NO: 65462 - DNA, 18 bp, Homo sapiens
  source 1..18: mol_type = genomic DNA
cggtagagcatgagactc

SEQ ID NO: 65463 - DNA, 19 bp, Homo sapiens
  source 1..19: mol_type = genomic DNA
cggtagagcatgagactct

SEQ ID NO: 65464 - DNA, 20 bp, Homo sapiens
  source 1..20: mol_type = genomic DNA
cggtagagcatgagactctt

SEQ ID NO: 65465 - DNA, 18 bp, Homo sapiens
  source 1..18: mol_type = genomic DNA
cggtagagcatgggactc

SEQ ID NO: 65466 - DNA, 19 bp, Homo sapiens
  source 1..19: mol_type = genomic DNA
cggtagagcatgggactct

SEQ ID NO: 65467 - DNA, 17 bp, Homo sapiens
  source 1..17: mol_type = genomic DNA
cggtagcgtggccgagc

SEQ ID NO: 65468 - DNA, 17 bp, Homo sapiens
  source 1..17: mol_type = genomic DNA
cggtctaaggcgctgcg

SEQ ID NO: 65469 - DNA, 20 bp, Homo sapiens
  source 1..20: mol_type = genomic DNA
cggtctaaggcgctgcgttc

SEQ ID NO: 65470 - DNA, 17 bp, Homo sapiens
  source 1..17: mol_type = genomic DNA
cggtctaaggcgctgga

SEQ ID NO: 65471 - DNA, 20 bp, Homo sapiens
  source 1..20: mol_type = genomic DNA
cggttaggattcctggtttt

SEQ ID NO: 65472 - DNA, 21 bp, Homo sapiens
  source 1..21: mol_type = genomic DNA
cggttaggattcctggttttc

SEQ ID NO: 65473 - DNA, 16 bp, Homo sapiens
  source 1..16: mol_type = genomic DNA
cggttcgaaaccgggc

SEQ ID NO: 65474 - DNA, 16 bp, Homo sapiens
  source 1..16: mol_type = genomic DNA
cgtagtcgtggccgag

SEQ ID NO: 65475 - DNA, 17 bp, Homo sapiens
  source 1..17: mol_type = genomic DNA
cgtagtcgtggccgagt

SEQ ID NO: 65476 - DNA, 19 bp, Homo sapiens
  source 1..19: mol_type = genomic DNA
cgtagtcgtggccgagtgg

SEQ ID NO: 65477 - DNA, 17 bp, Homo sapiens
  source 1..17: mol_type = genomic DNA
cgtatagtggttagtac

SEQ ID NO: 65478 - DNA, 20 bp, Homo sapiens
  source 1..20: mol_type = genomic DNA
cgtatagtggttagtactct

SEQ ID NO: 65479 - DNA, 22 bp, Homo sapiens
  source 1..22: mol_type = genomic DNA
cgtatagtggttagtactctgc

SEQ ID NO: 65480 - DNA, 20 bp, Homo sapiens
  source 1..20: mol_type = genomic DNA
cgtctctgtggcgcaatgga

SEQ ID NO: 65481 - DNA, 21 bp, Homo sapiens
  source 1..21: mol_type = genomic DNA
cgtctctgtggcgcaatggac

SEQ ID NO: 65482 - DNA, 19 bp, Homo sapiens
  source 1..19: mol_type = genomic DNA
cgtgctgggcccataaccc

SEQ ID NO: 65483 - DNA, 22 bp, Homo sapiens
  source 1..22: mol_type = genomic DNA
cgtgctgggcccataacccaga

SEQ ID NO: 65484 - DNA, 18 bp, Homo sapiens
  source 1..18: mol_type = genomic DNA
cgtggttgtagtccgtgc

SEQ ID NO: 65485 - DNA, 19 bp, Homo sapiens
  source 1..19: mol_type = genomic DNA
cgtggttgtagtccgtgcg

SEQ ID NO: 65486 - DNA, 20 bp, Homo sapiens
  source 1..20: mol_type = genomic DNA
cgtggttgtagtccgtgcga

SEQ ID NO: 65487 - DNA, 21 bp, Homo sapiens
  source 1..21: mol_type = genomic DNA
cgtggttgtagtccgtgcgag

SEQ ID NO: 65488 - DNA, 22 bp, Homo sapiens
  source 1..22: mol_type = genomic DNA
cgtggttgtagtccgtgcgaga

SEQ ID NO: 65489 - DNA, 25 bp, Homo sapiens
  source 1..25: mol_type = genomic DNA
cgtggttgtagtccgtgcgagaata

SEQ ID NO: 65490 - DNA, 18 bp, Homo sapiens
  source 1..18: mol_type = genomic DNA
cgttcaggtcgcagtctc

SEQ ID NO: 65491 - DNA, 19 bp, Homo sapiens
  source 1..19: mol_type = genomic DNA
cgttcaggtcgcagtctcc

SEQ ID NO: 65492 - DNA, 20 bp, Homo sapiens
  source 1..20: mol_type = genomic DNA
cgttcaggtcgcagtctccc

SEQ ID NO: 65493 - DNA, 20 bp, Homo sapiens
  source 1..20: mol_type = genomic DNA
cgtttccgtagtgtagtggt

SEQ ID NO: 65494 - DNA, 16 bp, Homo sapiens
  source 1..16: mol_type = genomic DNA
ctaaataagctatcgg

SEQ ID NO: 65495 - DNA, 17 bp, Homo sapiens
  source 1..17: mol_type = genomic DNA
ctaaataagctatcggg

SEQ ID NO: 65496 - DNA, 18 bp, Homo sapiens
  source 1..18: mol_type = genomic DNA
ctaaataagctatcgggc

SEQ ID NO: 65497 - DNA, 19 bp, Homo sapiens
  source 1..19: mol_type = genomic DNA
ctaaataagctatcgggcc

SEQ ID NO: 65498 - DNA, 20 bp, Homo sapiens
  source 1..20: mol_type = genomic DNA
ctaaataagctatcgggccc

SEQ ID NO: 65499 - DNA, 21 bp, Homo sapiens
  source 1..21: mol_type = genomic DNA
ctaaataagctatcgggccca

SEQ ID NO: 65500 - DNA, 22 bp, Homo sapiens
  source 1..22: mol_type = genomic DNA
ctaaatcctatatatcttacca

SEQ ID NO: 65501 - DNA, 17 bp, Homo sapiens
  source 1..17: mol_type = genomic DNA
ctaacaacatggctttc

SEQ ID NO: 65502 - DNA, 18 bp, Homo sapiens
  source 1..18: mol_type = genomic DNA
ctaacaacatggctttct

SEQ ID NO: 65503 - DNA, 19 bp, Homo sapiens
  source 1..19: mol_type = genomic DNA
ctaacaacatggctttctc

SEQ ID NO: 65504 - DNA, 20 bp, Homo sapiens
  source 1..20: mol_type = genomic DNA
ctaacaacatggctttctca

SEQ ID NO: 65505 - DNA, 22 bp, Homo sapiens
  source 1..22: mol_type = genomic DNA
ctaacaacatggctttctcacc

SEQ ID NO: 65506 - DNA, 23 bp, Homo sapiens
  source 1..23: mol_type = genomic DNA
ctaacaacatggctttctcacca

SEQ ID NO: 65507 - DNA, 16 bp, Homo sapiens
  source 1..16: mol_type = genomic DNA
ctaagccagggattgt

SEQ ID NO: 65508 - DNA, 17 bp, Homo sapiens
  source 1..17: mol_type = genomic DNA
ctaagccagggattgtg

SEQ ID NO: 65509 - DNA, 18 bp, Homo sapiens
  source 1..18: mol_type = genomic DNA
ctaagccagggattgtgg

SEQ ID NO: 65510 - DNA, 20 bp, Homo sapiens
  source 1..20: mol_type = genomic DNA
ctaagccagggattgtgggt

SEQ ID NO: 65511 - DNA, 17 bp, Homo sapiens
  source 1..17: mol_type = genomic DNA
ctaatggataaggcact

SEQ ID NO: 65512 - DNA, 18 bp, Homo sapiens
  source 1..18: mol_type = genomic DNA
ctaatggataaggcactg

SEQ ID NO: 65513 - DNA, 18 bp, Homo sapiens
  source 1..18: mol_type = genomic DNA
ctaatggataaggcatca

SEQ ID NO: 65514 - DNA, 18 bp, Homo sapiens
  source 1..18: mol_type = genomic DNA
ctaatggataaggcattg

SEQ ID NO: 65515 - DNA, 20 bp, Homo sapiens
  source 1..20: mol_type = genomic DNA
ctaatggtggagttaaagac

SEQ ID NO: 65516 - DNA, 21 bp, Homo sapiens
  source 1..21: mol_type = genomic DNA
ctaatggtggagttaaagact

SEQ ID NO: 65517 - DNA, 16 bp, Homo sapiens
  source 1..16: mol_type = genomic DNA
ctagctcagtcggtag

SEQ ID NO: 65518 - DNA, 17 bp, Homo sapiens
  source 1..17: mol_type = genomic DNA
ctagctcagtcggtaga

SEQ ID NO: 65519 - DNA, 19 bp, Homo sapiens
  source 1..19: mol_type = genomic DNA
ctagctcagtcggtagagc

SEQ ID NO: 65520 - DNA, 18 bp, Homo sapiens
  source 1..18: mol_type = genomic DNA
ctaggattcggcgctttc

SEQ ID NO: 65521 - DNA, 19 bp, Homo sapiens
  source 1..19: mol_type = genomic DNA
ctaggggtatgattctcgc

SEQ ID NO: 65522 - DNA, 19 bp, Homo sapiens
  source 1..19: mol_type = genomic DNA
ctagtggttaggattcggc

SEQ ID NO: 65523 - DNA, 21 bp, Homo sapiens
  source 1..21: mol_type = genomic DNA
ctagtggttaggattcggcgc

SEQ ID NO: 65524 - DNA, 23 bp, Homo sapiens
  source 1..23: mol_type = genomic DNA
ctagtggttaggattcggcgctc

SEQ ID NO: 65525 - DNA, 16 bp, Homo sapiens
  source 1..16: mol_type = genomic DNA
ctatccattggtctta

SEQ ID NO: 65526 - DNA, 19 bp, Homo sapiens
  source 1..19: mol_type = genomic DNA
ctatccattggtcttaggc

SEQ ID NO: 65527 - DNA, 16 bp, Homo sapiens
  source 1..16: mol_type = genomic DNA
ctatcgggcccatacc

SEQ ID NO: 65528 - DNA, 17 bp, Homo sapiens
  source 1..17: mol_type = genomic DNA
ctatcgggcccataccc

SEQ ID NO: 65529 - DNA, 19 bp, Homo sapiens
  source 1..19: mol_type = genomic DNA
ctatcgggcccataccccg

SEQ ID NO: 65530 - DNA, 20 bp, Homo sapiens
  source 1..20: mol_type = genomic DNA
ctatcgggcccataccccga

SEQ ID NO: 65531 - DNA, 21 bp, Homo sapiens
  source 1..21: mol_type = genomic DNA
ctatcgggcccataccccgaa

SEQ ID NO: 65532 - DNA, 22 bp, Homo sapiens
  source 1..22: mol_type = genomic DNA
ctatcgggcccataccccgaaa

SEQ ID NO: 65533 - DNA, 19 bp, Homo sapiens
  source 1..19: mol_type = genomic DNA
ctcaaagcaatacactgaa

SEQ ID NO: 65534 - DNA, 16 bp, Homo sapiens
  source 1..16: mol_type = genomic DNA
ctcaagttctggtctc

SEQ ID NO: 65535 - DNA, 17 bp, Homo sapiens
  source 1..17: mol_type = genomic DNA
ctcaagttctggtctcc

SEQ ID NO: 65536 - DNA, 20 bp, Homo sapiens
  source 1..20: mol_type = genomic DNA
ctcaagttctggtctccgga

SEQ ID NO: 65537 - DNA, 17 bp, Homo sapiens
  source 1..17: mol_type = genomic DNA
ctcacaagaactgctaa

SEQ ID NO: 65538 - DNA, 18 bp, Homo sapiens
  source 1..18: mol_type = genomic DNA
ctcacaagaactgctaac

SEQ ID NO: 65539 - DNA, 19 bp, Homo sapiens
  source 1..19: mol_type = genomic DNA
ctcacaagaactgctaact

SEQ ID NO: 65540 - DNA, 20 bp, Homo sapiens
  source 1..20: mol_type = genomic DNA
ctcacaagaactgctaactc

SEQ ID NO: 65541 - DNA, 21 bp, Homo sapiens
  source 1..21: mol_type = genomic DNA
ctcacaagaactgctaactca

SEQ ID NO: 65542 - DNA, 16 bp, Homo sapiens
  source 1..16: mol_type = genomic DNA
ctcacacggggcacca

SEQ ID NO: 65543 - DNA, 16 bp, Homo sapiens
  source 1..16: mol_type = genomic DNA
ctcacatcaccccata

SEQ ID NO: 65544 - DNA, 17 bp, Homo sapiens
  source 1..17: mol_type = genomic DNA
ctcacatcaccccataa

SEQ ID NO: 65545 - DNA, 18 bp, Homo sapiens
  source 1..18: mol_type = genomic DNA
ctcacatcaccccataaa

SEQ ID NO: 65546 - DNA, 19 bp, Homo sapiens
  source 1..19: mol_type = genomic DNA
ctcacatcaccccataaac

SEQ ID NO: 65547 - DNA, 20 bp, Homo sapiens
  source 1..20: mol_type = genomic DNA
ctcacatcaccccataaaca

SEQ ID NO: 65548 - DNA, 22 bp, Homo sapiens
  source 1..22: mol_type = genomic DNA
ctcacatcaccccataaacacc

SEQ ID NO: 65549 - DNA, 23 bp, Homo sapiens
  source 1..23: mol_type = genomic DNA
ctcacatcaccccataaacacca

SEQ ID NO: 65550 - DNA, 16 bp, Homo sapiens
  source 1..16: mol_type = genomic DNA
ctcacctggagcacca

SEQ ID NO: 65551 - DNA, 16 bp, Homo sapiens
  source 1..16: mol_type = genomic DNA
ctcagagggggcacca

SEQ ID NO: 65552 - DNA, 16 bp, Homo sapiens
  source 1..16: mol_type = genomic DNA
ctcagggatgggttcg

SEQ ID NO: 65553 - DNA, 17 bp, Homo sapiens
  source 1..17: mol_type = genomic DNA
ctcagggtcgtgggttc

SEQ ID NO: 65554 - DNA, 18 bp, Homo sapiens
  source 1..18: mol_type = genomic DNA
ctcagggtcgtgggttcg

SEQ ID NO: 65555 - DNA, 18 bp, Homo sapiens
  source 1..18: mol_type = genomic DNA
ctcagtaagttgcaatac

SEQ ID NO: 65556 - DNA, 19 bp, Homo sapiens
  source 1..19: mol_type = genomic DNA
ctcagtaagttgcaatact

SEQ ID NO: 65557 - DNA, 20 bp, Homo sapiens
  source 1..20: mol_type = genomic DNA
ctcagtaagttgcaatactt

SEQ ID NO: 65558 - DNA, 21 bp, Homo sapiens
  source 1..21: mol_type = genomic DNA
ctcagtaagttgcaatactta

SEQ ID NO: 65559 - DNA, 18 bp, Homo sapiens
  source 1..18: mol_type = genomic DNA
ctcagtcggtagagcatc

SEQ ID NO: 65560 - DNA, 19 bp, Homo sapiens
  source 1..19: mol_type = genomic DNA
ctcagtcggtagagcatca

SEQ ID NO: 65561 - DNA, 20 bp, Homo sapiens
  source 1..20: mol_type = genomic DNA
ctcagtcggtagagcatcag

SEQ ID NO: 65562 - DNA, 21 bp, Homo sapiens
  source 1..21: mol_type = genomic DNA
ctcagtcggtagagcatcaga

SEQ ID NO: 65563 - DNA, 22 bp, Homo sapiens
  source 1..22: mol_type = genomic DNA
ctcagtcggtagagcatcagac

SEQ ID NO: 65564 - DNA, 23 bp, Homo sapiens
  source 1..23: mol_type = genomic DNA
ctcagtcggtagagcatcagact

SEQ ID NO: 65565 - DNA, 18 bp, Homo sapiens
  source 1..18: mol_type = genomic DNA
ctcagtcggtagagcatg

SEQ ID NO: 65566 - DNA, 19 bp, Homo sapiens
  source 1..19: mol_type = genomic DNA
ctcagtcggtagagcatga

SEQ ID NO: 65567 - DNA, 20 bp, Homo sapiens
  source 1..20: mol_type = genomic DNA
ctcagtcggtagagcatgag

SEQ ID NO: 65568 - DNA, 21 bp, Homo sapiens
  source 1..21: mol_type = genomic DNA
ctcagtcggtagagcatgaga

SEQ ID NO: 65569 - DNA, 22 bp, Homo sapiens
  source 1..22: mol_type = genomic DNA
ctcagtcggtagagcatgagac

SEQ ID NO: 65570 - DNA, 23 bp, Homo sapiens
  source 1..23: mol_type = genomic DNA
ctcagtcggtagagcatgagact

SEQ ID NO: 65571 - DNA, 24 bp, Homo sapiens
  source 1..24: mol_type = genomic DNA
ctcagtcggtagagcatgagactc

SEQ ID NO: 65572 - DNA, 25 bp, Homo sapiens
  source 1..25: mol_type = genomic DNA
ctcagtcggtagagcatgagactct

SEQ ID NO: 65573 - DNA, 19 bp, Homo sapiens
  source 1..19: mol_type = genomic DNA
ctcagtcggtagagcatgg

SEQ ID NO: 65574 - DNA, 20 bp, Homo sapiens
  source 1..20: mol_type = genomic DNA
ctcagtcggtagagcatggg

SEQ ID NO: 65575 - DNA, 21 bp, Homo sapiens
  source 1..21: mol_type = genomic DNA
ctcagtcggtagagcatggga

SEQ ID NO: 65576 - DNA, 22 bp, Homo sapiens
  source 1..22: mol_type = genomic DNA
ctcagtcggtagagcatgggac

SEQ ID NO: 65577 - DNA, 23 bp, Homo sapiens
  source 1..23: mol_type = genomic DNA
ctcagtcggtagagcatgggact

SEQ ID NO: 65578 - DNA, 24 bp, Homo sapiens
  source 1..24: mol_type = genomic DNA
ctcagtcggtagagcatgggactc

SEQ ID NO: 65579 - DNA, 25 bp, Homo sapiens
  source 1..25: mol_type = genomic DNA
ctcagtcggtagagcatgggactct

SEQ ID NO: 65580 - DNA, 20 bp, Homo sapiens
  source 1..20: mol_type = genomic DNA
ctcagtggtagagcatttga

SEQ ID NO: 65581 - DNA, 17 bp, Homo sapiens
  source 1..17: mol_type = genomic DNA
ctccaaataaaagtacc

SEQ ID NO: 65582 - DNA, 18 bp, Homo sapiens
  source 1..18: mol_type = genomic DNA
ctccaaataaaagtacca

SEQ ID NO: 65583 - DNA, 16 bp, Homo sapiens
  source 1..16: mol_type = genomic DNA
ctcccggtatgggaac

SEQ ID NO: 65584 - DNA, 16 bp, Homo sapiens
  source 1..16: mol_type = genomic DNA
ctcccggtgtgggaac

SEQ ID NO: 65585 - DNA, 17 bp, Homo sapiens
  source 1..17: mol_type = genomic DNA
ctcccggtgtgggaacc

SEQ ID NO: 65586 - DNA, 18 bp, Homo sapiens
  source 1..18: mol_type = genomic DNA
ctcccggtgtgggaacca

SEQ ID NO: 65587 - DNA, 16 bp, Homo sapiens
  source 1..16: mol_type = genomic DNA
ctccgaggtgattttc

SEQ ID NO: 65588 - DNA, 17 bp, Homo sapiens
  source 1..17: mol_type = genomic DNA
ctccgaggtgattttca

SEQ ID NO: 65589 - DNA, 18 bp, Homo sapiens
  source 1..18: mol_type = genomic DNA
ctccgaggtgattttcat

SEQ ID NO: 65590 - DNA, 19 bp, Homo sapiens
  source 1..19: mol_type = genomic DNA
ctccgaggtgattttcata

SEQ ID NO: 65591 - DNA, 20 bp, Homo sapiens
  source 1..20: mol_type = genomic DNA
ctccgaggtgattttcatat

SEQ ID NO: 65592 - DNA, 21 bp, Homo sapiens
  source 1..21: mol_type = genomic DNA
ctccgaggtgattttcatatt

SEQ ID NO: 65593 - DNA, 22 bp, Homo sapiens
  source 1..22: mol_type = genomic DNA
ctccgaggtgattttcatattg

SEQ ID NO: 65594 - DNA, 23 bp, Homo sapiens
  source 1..23: mol_type = genomic DNA
ctccgaggtgattttcatattga

SEQ ID NO: 65595 - DNA, 17 bp, Homo sapiens
  source 1..17: mol_type = genomic DNA
ctccgtggcgcaatgga

SEQ ID NO: 65596 - DNA, 16 bp, Homo sapiens
  source 1..16: mol_type = genomic DNA
ctcctcaaagcaatac

SEQ ID NO: 65597 - DNA, 17 bp, Homo sapiens
  source 1..17: mol_type = genomic DNA
ctcctcaaagcaataca

SEQ ID NO: 65598 - DNA, 18 bp, Homo sapiens
  source 1..18: mol_type = genomic DNA
ctcctcaaagcaatacac

SEQ ID NO: 65599 - DNA, 19 bp, Homo sapiens
  source 1..19: mol_type = genomic DNA
ctcctcaaagcaatacact

SEQ ID NO: 65600 - DNA, 16 bp, Homo sapiens
  source 1..16: mol_type = genomic DNA
ctcctggctggctcgc

SEQ ID NO: 65601 - DNA, 17 bp, Homo sapiens
  source 1..17: mol_type = genomic DNA
ctcctggctggctcgcc

SEQ ID NO: 65602 - DNA, 18 bp, Homo sapiens
  source 1..18: mol_type = genomic DNA
ctcctggctggctcgcca

SEQ ID NO: 65603 - DNA, 16 bp, Homo sapiens
  source 1..16: mol_type = genomic DNA
ctcgctggggcctcca

SEQ ID NO: 65604 - DNA, 16 bp, Homo sapiens
  source 1..16: mol_type = genomic DNA
ctcggtggaacctcca

SEQ ID NO: 65605 - DNA, 16 bp, Homo sapiens
  source 1..16: mol_type = genomic DNA
ctcggtgggacctcca

SEQ ID NO: 65606 - DNA, 17 bp, Homo sapiens
  source 1..17: mol_type = genomic DNA
ctcgttagcgcagtagg

SEQ ID NO: 65607 - DNA, 17 bp, Homo sapiens
  source 1..17: mol_type = genomic DNA
ctcgttagtatagtggt

SEQ ID NO: 65608 - DNA, 20 bp, Homo sapiens
  source 1..20: mol_type = genomic DNA
ctctgaatccagcgatccga

SEQ ID NO: 65609 - DNA, 20 bp, Homo sapiens
  source 1..20: mol_type = genomic DNA
ctctggactctgaatccagc

SEQ ID NO: 65610 - DNA, 17 bp, Homo sapiens
  source 1..17: mol_type = genomic DNA
ctctgtggcgcaatgga

SEQ ID NO: 65611 - DNA, 18 bp, Homo sapiens
  source 1..18: mol_type = genomic DNA
ctctgtggcgcaatggac

SEQ ID NO: 65612 - DNA, 18 bp, Homo sapiens
  source 1..18: mol_type = genomic DNA
ctcttaatcccagggtcg

SEQ ID NO: 65613 - DNA, 19 bp, Homo sapiens
  source 1..19: mol_type = genomic DNA
ctcttaatcccagggtcgt

SEQ ID NO: 65614 - DNA, 16 bp, Homo sapiens
  source 1..16: mol_type = genomic DNA
ctctttacagtgacca

SEQ ID NO: 65615 - DNA, 16 bp, Homo sapiens
  source 1..16: mol_type = genomic DNA
ctgaaaatgtttagac

SEQ ID NO: 65616 - DNA, 20 bp, Homo sapiens
  source 1..20: mol_type = genomic DNA
ctgaaaatgtttagacgggc

SEQ ID NO: 65617 - DNA, 17 bp, Homo sapiens
  source 1..17: mol_type = genomic DNA
ctgaaggtcctgagttc

SEQ ID NO: 65618 - DNA, 18 bp, Homo sapiens
  source 1..18: mol_type = genomic DNA
ctgaaggtcctgagttcg

SEQ ID NO: 65619 - DNA, 17 bp, Homo sapiens
  source 1..17: mol_type = genomic DNA
ctgaaggtcgtgagttc

SEQ ID NO: 65620 - DNA, 18 bp, Homo sapiens
  source 1..18: mol_type = genomic DNA
ctgaaggtcgtgagttcg

SEQ ID NO: 65621 - DNA, 19 bp, Homo sapiens
  source 1..19: mol_type = genomic DNA
ctgaatccagcgatccgag

SEQ ID NO: 65622 - DNA, 22 bp, Homo sapiens
  source 1..22: mol_type = genomic DNA
ctgaatccagcgatccgagttc

SEQ ID NO: 65623 - DNA, 23 bp, Homo sapiens
  source 1..23: mol_type = genomic DNA
ctgaatccagcgatccgagttca

SEQ ID NO: 65624 - DNA, 16 bp, Homo sapiens
  source 1..16: mol_type = genomic DNA
ctgacaacagaggctt

SEQ ID NO: 65625 - DNA, 17 bp, Homo sapiens
  source 1..17: mol_type = genomic DNA
ctgacaacagaggctta

SEQ ID NO: 65626 - DNA, 18 bp, Homo sapiens
  source 1..18: mol_type = genomic DNA
ctgacaacagaggcttac

SEQ ID NO: 65627 - DNA, 19 bp, Homo sapiens
  source 1..19: mol_type = genomic DNA
ctgacaacagaggcttacg

SEQ ID NO: 65628 - DNA, 19 bp, Homo sapiens
  source 1..19: mol_type = genomic DNA
ctgacttcggatcagaaga

SEQ ID NO: 65629 - DNA, 17 bp, Homo sapiens
  source 1..17: mol_type = genomic DNA
ctgagggtccagggttc

SEQ ID NO: 65630 - DNA, 18 bp, Homo sapiens
  source 1..18: mol_type = genomic DNA
ctgagggtccagggttca

SEQ ID NO: 65631 - DNA, 18 bp, Homo sapiens
  source 1..18: mol_type = genomic DNA
ctgagtgaagcattggac

SEQ ID NO: 65632 - DNA, 19 bp, Homo sapiens
  source 1..19: mol_type = genomic DNA
ctgattccggatcagaaga

SEQ ID NO: 65633 - DNA, 18 bp, Homo sapiens
  source 1..18: mol_type = genomic DNA
ctgctaactcatgccccc

SEQ ID NO: 65634 - DNA, 18 bp, Homo sapiens
  source 1..18: mol_type = genomic DNA
ctggactctgaatccagc

SEQ ID NO: 65635 - DNA, 19 bp, Homo sapiens
  source 1..19: mol_type = genomic DNA
ctggactctgaatccagcg

SEQ ID NO: 65636 - DNA, 20 bp, Homo sapiens
  source 1..20: mol_type = genomic DNA
ctggactctgaatccagcga

SEQ ID NO: 65637 - DNA, 17 bp, Homo sapiens
  source 1..17: mol_type = genomic DNA
ctggggattgtgggttc

SEQ ID NO: 65638 - DNA, 18 bp, Homo sapiens
  source 1..18: mol_type = genomic DNA
ctggggattgtgggttcg

SEQ ID NO: 65639 - DNA, 19 bp, Homo sapiens
  source 1..19: mol_type = genomic DNA
ctggtggtctagtggttag

SEQ ID NO: 65640 - DNA, 20 bp, Homo sapiens
  source 1..20: mol_type = genomic DNA
ctggtggtctagtggttagg

SEQ ID NO: 65641 - DNA, 21 bp, Homo sapiens
  source 1..21: mol_type = genomic DNA
ctggtggtctagtggttagga

SEQ ID NO: 65642 - DNA, 22 bp, Homo sapiens
  source 1..22: mol_type = genomic DNA
ctggtggtctagtggttaggat

SEQ ID NO: 65643 - DNA, 23 bp, Homo sapiens
  source 1..23: mol_type = genomic DNA
ctggtggtctagtggttaggatt

SEQ ID NO: 65644 - DNA, 24 bp, Homo sapiens
  source 1..24: mol_type = genomic DNA
ctggtggtctagtggttaggattc

SEQ ID NO: 65645 - DNA, 25 bp, Homo sapiens
  source 1..25: mol_type = genomic DNA
ctggtggtctagtggttaggattcg

SEQ ID NO: 65646 - DNA, 20 bp, Homo sapiens
  source 1..20: mol_type = genomic DNA
ctggtgtagtggtatcatgc

SEQ ID NO: 65647 - DNA, 21 bp, Homo sapiens
  source 1..21: mol_type = genomic DNA
ctggtgtagtggtatcatgca

SEQ ID NO: 65648 - DNA, 23 bp, Homo sapiens
  source 1..23: mol_type = genomic DNA
ctggtgtagtggtatcatgcaag

SEQ ID NO: 65649 - DNA, 16 bp, Homo sapiens
  source 1..16: mol_type = genomic DNA
ctgtcacgcgggagac

SEQ ID NO: 65650 - DNA, 16 bp, Homo sapiens
  source 1..16: mol_type = genomic DNA
ctgtggcgcaatggac

SEQ ID NO: 65651 - DNA, 20 bp, Homo sapiens
  source 1..20: mol_type = genomic DNA
cttaaaactttacagtcaga

SEQ ID NO: 65652 - DNA, 24 bp, Homo sapiens
  source 1..24: mol_type = genomic DNA
cttaaaactttacagtcagaggtt

SEQ ID NO: 65653 - DNA, 16 bp, Homo sapiens
  source 1..16: mol_type = genomic DNA
cttaaacccccttatt

SEQ ID NO: 65654 - DNA, 19 bp, Homo sapiens
  source 1..19: mol_type = genomic DNA
cttaaacccccttatttct

SEQ ID NO: 65655 - DNA, 20 bp, Homo sapiens
  source 1..20: mol_type = genomic DNA
cttaaacccccttatttcta

SEQ ID NO: 65656 - DNA, 21 bp, Homo sapiens
  source 1..21: mol_type = genomic DNA
cttaaacccccttatttctac

SEQ ID NO: 65657 - DNA, 22 bp, Homo sapiens
  source 1..22: mol_type = genomic DNA
cttaaacccccttatttctacc

SEQ ID NO: 65658 - DNA, 23 bp, Homo sapiens
  source 1..23: mol_type = genomic DNA
cttaaacccccttatttctacca

SEQ ID NO: 65659 - DNA, 18 bp, Homo sapiens
  source 1..18: mol_type = genomic DNA
cttaacacaaagcaccca

SEQ ID NO: 65660 - DNA, 16 bp, Homo sapiens
  source 1..16: mol_type = genomic DNA
cttaacttgaccgctc

SEQ ID NO: 65661 - DNA, 17 bp, Homo sapiens
  source 1..17: mol_type = genomic DNA
cttaacttgaccgctct

SEQ ID NO: 65662 - DNA, 18 bp, Homo sapiens
  source 1..18: mol_type = genomic DNA
cttaacttgaccgctctg

SEQ ID NO: 65663 - DNA, 19 bp, Homo sapiens
  source 1..19: mol_type = genomic DNA
cttaacttgaccgctctga

SEQ ID NO: 65664 - DNA, 20 bp, Homo sapiens
  source 1..20: mol_type = genomic DNA
cttaacttgaccgctctgac

SEQ ID NO: 65665 - DNA, 21 bp, Homo sapiens
  source 1..21: mol_type = genomic DNA
cttaacttgaccgctctgacc

SEQ ID NO: 65666 - DNA, 22 bp, Homo sapiens
  source 1..22: mol_type = genomic DNA
cttaacttgaccgctctgacca

SEQ ID NO: 65667 - DNA, 16 bp, Homo sapiens
  source 1..16: mol_type = genomic DNA
cttaagatccaatgga

SEQ ID NO: 65668 - DNA, 17 bp, Homo sapiens
  source 1..17: mol_type = genomic DNA
cttaagatccaatggac

SEQ ID NO: 65669 - DNA, 19 bp, Homo sapiens
  source 1..19: mol_type = genomic DNA
cttaagatccaatggacat

SEQ ID NO: 65670 - DNA, 17 bp, Homo sapiens
  source 1..17: mol_type = genomic DNA
cttacacttaggagatt

SEQ ID NO: 65671 - DNA, 18 bp, Homo sapiens
  source 1..18: mol_type = genomic DNA
cttacacttaggagattt

SEQ ID NO: 65672 - DNA, 19 bp, Homo sapiens
  source 1..19: mol_type = genomic DNA
cttacacttaggagatttc

SEQ ID NO: 65673 - DNA, 20 bp, Homo sapiens
  source 1..20: mol_type = genomic DNA
cttacacttaggagatttca

SEQ ID NO: 65674 - DNA, 21 bp, Homo sapiens
  source 1..21: mol_type = genomic DNA
cttacacttaggagatttcaa

SEQ ID NO: 65675 - DNA, 22 bp, Homo sapiens
  source 1..22: mol_type = genomic DNA
cttacacttaggagatttcaac

SEQ ID NO: 65676 - DNA, 21 bp, Homo sapiens
  source 1..21: mol_type = genomic DNA
cttacgaccccttatttaccc

SEQ ID NO: 65677 - DNA, 22 bp, Homo sapiens
  source 1..22: mol_type = genomic DNA
cttacgaccccttatttacccc

SEQ ID NO: 65678 - DNA, 23 bp, Homo sapiens
  source 1..23: mol_type = genomic DNA
cttacgaccccttatttacccca

SEQ ID NO: 65679 - DNA, 19 bp, Homo sapiens
  source 1..19: mol_type = genomic DNA
cttagcattaaccttttaa

SEQ ID NO: 65680 - DNA, 16 bp, Homo sapiens
  source 1..16: mol_type = genomic DNA
cttaggagatttcaac

SEQ ID NO: 65681 - DNA, 17 bp, Homo sapiens
  source 1..17: mol_type = genomic DNA
cttaggagatttcaact

SEQ ID NO: 65682 - DNA, 18 bp, Homo sapiens
  source 1..18: mol_type = genomic DNA
cttaggagatttcaactt

SEQ ID NO: 65683 - DNA, 19 bp, Homo sapiens
  source 1..19: mol_type = genomic DNA
cttaggagatttcaactta

SEQ ID NO: 65684 - DNA, 20 bp, Homo sapiens
  source 1..20: mol_type = genomic DNA
cttaggagatttcaacttaa

SEQ ID NO: 65685 - DNA, 21 bp, Homo sapiens
  source 1..21: mol_type = genomic DNA
cttaggagatttcaacttaac

SEQ ID NO: 65686 - DNA, 22 bp, Homo sapiens
  source 1..22: mol_type = genomic DNA
cttaggagatttcaacttaact

SEQ ID NO: 65687 - DNA, 16 bp, Homo sapiens
  source 1..16: mol_type = genomic DNA
cttcaaacctgccggg

SEQ ID NO: 65688 - DNA, 18 bp, Homo sapiens
  source 1..18: mol_type = genomic DNA
cttcaaacctgccggggc

SEQ ID NO: 65689 - DNA, 19 bp, Homo sapiens
  source 1..19: mol_type = genomic DNA
cttcaaacctgccggggct

SEQ ID NO: 65690 - DNA, 20 bp, Homo sapiens
  source 1..20: mol_type = genomic DNA
cttcaaacctgccggggctt

SEQ ID NO: 65691 - DNA, 21 bp, Homo sapiens
  source 1..21: mol_type = genomic DNA
cttcaaacctgccggggcttc

SEQ ID NO: 65692 - DNA, 22 bp, Homo sapiens
  source 1..22: mol_type = genomic DNA
cttcaaacctgccggggcttcc

SEQ ID NO: 65693 - DNA, 19 bp, Homo sapiens
  source 1..19: mol_type = genomic DNA
cttcggatcagaagattga

SEQ ID NO: 65694 - DNA, 16 bp, Homo sapiens
  source 1..16: mol_type = genomic DNA
cttcgggggcgtgggt

SEQ ID NO: 65695 - DNA, 16 bp, Homo sapiens
  source 1..16: mol_type = genomic DNA
cttgaccgctctgacc

SEQ ID NO: 65696 - DNA, 17 bp, Homo sapiens
  source 1..17: mol_type = genomic DNA
cttgaccgctctgacca

SEQ ID NO: 65697 - DNA, 17 bp, Homo sapiens
  source 1..17: mol_type = genomic DNA
ctttacagtcagaggtt

SEQ ID NO: 65698 - DNA, 18 bp, Homo sapiens
  source 1..18: mol_type = genomic DNA
ctttacagtcagaggttc

SEQ ID NO: 65699 - DNA, 19 bp, Homo sapiens
  source 1..19: mol_type = genomic DNA
ctttacagtcagaggttca

SEQ ID NO: 65700 - DNA, 18 bp, Homo sapiens
  source 1..18: mol_type = genomic DNA
ctttgatagagtaaataa

SEQ ID NO: 65701 - DNA, 19 bp, Homo sapiens
  source 1..19: mol_type = genomic DNA
ctttgatagagtaaataat

SEQ ID NO: 65702 - DNA, 16 bp, Homo sapiens
  source 1..16: mol_type = genomic DNA
ctttgcacgcgtgggt

SEQ ID NO: 65703 - DNA, 16 bp, Homo sapiens
  source 1..16: mol_type = genomic DNA
ctttgggtgctaatgg

SEQ ID NO: 65704 - DNA, 20 bp, Homo sapiens
  source 1..20: mol_type = genomic DNA
cttttaagttaaagattaag

SEQ ID NO: 65705 - DNA, 21 bp, Homo sapiens
  source 1..21: mol_type = genomic DNA
cttttaagttaaagattaaga

SEQ ID NO: 65706 - DNA, 22 bp, Homo sapiens
  source 1..22: mol_type = genomic DNA
cttttaagttaaagattaagag

SEQ ID NO: 65707 - DNA, 23 bp, Homo sapiens
  source 1..23: mol_type = genomic DNA
cttttaagttaaagattaagaga

SEQ ID NO: 65708 - DNA, 24 bp, Homo sapiens
  source 1..24: mol_type = genomic DNA
cttttaagttaaagattaagagaa

SEQ ID NO: 65709 - DNA, 16 bp, Homo sapiens
  source 1..16: mol_type = genomic DNA
ctttttccaaggacac

SEQ ID NO: 65710 - DNA, 17 bp, Homo sapiens
  source 1..17: mol_type = genomic DNA
ctttttccaaggacacc

SEQ ID NO: 65711 - DNA, 18 bp, Homo sapiens
  source 1..18: mol_type = genomic DNA
ctttttccaaggacacca

SEQ ID NO: 65712 - DNA, 16 bp, Homo sapiens
  source 1..16: mol_type = genomic DNA
gaaaaagtcatggagg

SEQ ID NO: 65713 - DNA, 17 bp, Homo sapiens
  source 1..17: mol_type = genomic DNA
gaaaaagtcatggaggc

SEQ ID NO: 65714 - DNA, 18 bp, Homo sapiens
  source 1..18: mol_type = genomic DNA
gaaaaagtcatggaggcc

SEQ ID NO: 65715 - DNA, 19 bp, Homo sapiens
  source 1..19: mol_type = genomic DNA
gaaaaagtcatggaggcca

SEQ ID NO: 65716 - DNA, 20 bp, Homo sapiens
  source 1..20: mol_type = genomic DNA
gaaaaagtcatggaggccat

SEQ ID NO: 65717 - DNA, 21 bp, Homo sapiens
  source 1..21: mol_type = genomic DNA
gaaaaagtcatggaggccatg

SEQ ID NO: 65718 - DNA, 22 bp, Homo sapiens
  source 1..22: mol_type = genomic DNA
gaaaaagtcatggaggccatgg

SEQ ID NO: 65719 - DNA, 24 bp, Homo sapiens
  source 1..24: mol_type = genomic DNA
gaaaaagtcatggaggccatgggg

SEQ ID NO: 65720 - DNA, 25 bp, Homo sapiens
  source 1..25: mol_type = genomic DNA
gaaaaagtcatggaggccatggggt

SEQ ID NO: 65721 - DNA, 24 bp, Homo sapiens
  source 1..24: mol_type = genomic DNA
gaaaacctttttccaaggacacca

SEQ ID NO: 65722 - DNA, 18 bp, Homo sapiens
  source 1..18: mol_type = genomic DNA
gaaaatgttggttatacc

SEQ ID NO: 65723 - DNA, 19 bp, Homo sapiens
  source 1..19: mol_type = genomic DNA
gaaaatgttggttataccc

SEQ ID NO: 65724 - DNA, 16 bp, Homo sapiens
  source 1..16: mol_type = genomic DNA
gaaaatgtttagacgg

SEQ ID NO: 65725 - DNA, 17 bp, Homo sapiens
  source 1..17: mol_type = genomic DNA
gaaaatgtttagacggg

SEQ ID NO: 65726 - DNA, 18 bp, Homo sapiens
  source 1..18: mol_type = genomic DNA
gaaaatgtttagacgggc

SEQ ID NO: 65727 - DNA, 19 bp, Homo sapiens
  source 1..19: mol_type = genomic DNA
gaaaatgtttagacgggct

SEQ ID NO: 65728 - DNA, 20 bp, Homo sapiens
  source 1..20: mol_type = genomic DNA
gaaaatgtttagacgggctc

SEQ ID NO: 65729 - DNA, 21 bp, Homo sapiens
  source 1..21: mol_type = genomic DNA
gaaaatgtttagacgggctca

SEQ ID NO: 65730 - DNA, 22 bp, Homo sapiens
  source 1..22: mol_type = genomic DNA
gaaaatgtttagacgggctcac

SEQ ID NO: 65731 - DNA, 23 bp, Homo sapiens
  source 1..23: mol_type = genomic DNA
gaaaatgtttagacgggctcaca

SEQ ID NO: 65732 - DNA, 24 bp, Homo sapiens
  source 1..24: mol_type = genomic DNA
gaaaatgtttagacgggctcacat

SEQ ID NO: 65733 - DNA, 20 bp, Homo sapiens
  source 1..20: mol_type = genomic DNA
gaaaccgggcggaaacacca

SEQ ID NO: 65734 - DNA, 16 bp, Homo sapiens
  source 1..16: mol_type = genomic DNA
gaaagctcacaagaac

SEQ ID NO: 65735 - DNA, 17 bp, Homo sapiens
  source 1..17: mol_type = genomic DNA
gaaagctcacaagaact

SEQ ID NO: 65736 - DNA, 18 bp, Homo sapiens
  source 1..18: mol_type = genomic DNA
gaaagctcacaagaactg

SEQ ID NO: 65737 - DNA, 19 bp, Homo sapiens
  source 1..19: mol_type = genomic DNA
gaaagctcacaagaactgc

SEQ ID NO: 65738 - DNA, 20 bp, Homo sapiens
  source 1..20: mol_type = genomic DNA
gaaagctcacaagaactgct

SEQ ID NO: 65739 - DNA, 21 bp, Homo sapiens
  source 1..21: mol_type = genomic DNA
gaaagctcacaagaactgcta

SEQ ID NO: 65740 - DNA, 22 bp, Homo sapiens
  source 1..22: mol_type = genomic DNA
gaaagctcacaagaactgctaa

SEQ ID NO: 65741 - DNA, 23 bp, Homo sapiens
  source 1..23: mol_type = genomic DNA
gaaagctcacaagaactgctaac

SEQ ID NO: 65742 - DNA, 24 bp, Homo sapiens
  source 1..24: mol_type = genomic DNA
gaaagctcacaagaactgctaact

SEQ ID NO: 65743 - DNA, 25 bp, Homo sapiens
  source 1..25: mol_type = genomic DNA
gaaagctcacaagaactgctaactc

SEQ ID NO: 65744 - DNA, 16 bp, Homo sapiens
  source 1..16: mol_type = genomic DNA
gaaaggttggtggttc

SEQ ID NO: 65745 - DNA, 21 bp, Homo sapiens
  source 1..21: mol_type = genomic DNA
gaaatacaacgatggtttttc

SEQ ID NO: 65746 - DNA, 16 bp, Homo sapiens
  source 1..16: mol_type = genomic DNA
gaaatttaggttaaat

SEQ ID NO: 65747 - DNA, 17 bp, Homo sapiens
  source 1..17: mol_type = genomic DNA
gaactgctaactcatgc

SEQ ID NO: 65748 - DNA, 18 bp, Homo sapiens
  source 1..18: mol_type = genomic DNA
gaactgctaactcatgcc

SEQ ID NO: 65749 - DNA, 16 bp, Homo sapiens
  source 1..16: mol_type = genomic DNA
gaagattgagggttcg

SEQ ID NO: 65750 - DNA, 19 bp, Homo sapiens
  source 1..19: mol_type = genomic DNA
gaagcagcttcaaacctgc

SEQ ID NO: 65751 - DNA, 16 bp, Homo sapiens
  source 1..16: mol_type = genomic DNA
gaagcattggactgta

SEQ ID NO: 65752 - DNA, 19 bp, Homo sapiens
  source 1..19: mol_type = genomic DNA
gaatccagcgatccgagtt

SEQ ID NO: 65753 - DNA, 20 bp, Homo sapiens
  source 1..20: mol_type = genomic DNA
gaatccagcgatccgagttc

SEQ ID NO: 65754 - DNA, 19 bp, Homo sapiens
  source 1..19: mol_type = genomic DNA
gaatcccagcggtgcctcc

SEQ ID NO: 65755 - DNA, 20 bp, Homo sapiens
  source 1..20: mol_type = genomic DNA
gaatcccatcctcgtcgcca

SEQ ID NO: 65756 - DNA, 17 bp, Homo sapiens
  source 1..17: mol_type = genomic DNA
gaatccgagtcacggca

SEQ ID NO: 65757 - DNA, 19 bp, Homo sapiens
  source 1..19: mol_type = genomic DNA
gaatccgagtcacggcacc

SEQ ID NO: 65758 - DNA, 20 bp, Homo sapiens
  source 1..20: mol_type = genomic DNA
gaatccgagtcacggcacca

SEQ ID NO: 65759 - DNA, 20 bp, Homo sapiens
  source 1..20: mol_type = genomic DNA
gaatccggctcgaaggacca

SEQ ID NO: 65760 - DNA, 17 bp, Homo sapiens
  source 1..17: mol_type = genomic DNA
gaatctgacaacagagg

SEQ ID NO: 65761 - DNA, 18 bp, Homo sapiens
  source 1..18: mol_type = genomic DNA
gaatctgacaacagaggc

SEQ ID NO: 65762 - DNA, 19 bp, Homo sapiens
  source 1..19: mol_type = genomic DNA
gaatctgacaacagaggct

SEQ ID NO: 65763 - DNA, 20 bp, Homo sapiens
  source 1..20: mol_type = genomic DNA
gaatctgacaacagaggctt

SEQ ID NO: 65764 - DNA, 21 bp, Homo sapiens
  source 1..21: mol_type = genomic DNA
gaatctgacaacagaggctta

SEQ ID NO: 65765 - DNA, 24 bp, Homo sapiens
  source 1..24: mol_type = genomic DNA
gaatctgacaacagaggcttacga

SEQ ID NO: 65766 - DNA, 16 bp, Homo sapiens
  source 1..16: mol_type = genomic DNA
gaatgatttcgactca

SEQ ID NO: 65767 - DNA, 17 bp, Homo sapiens
  source 1..17: mol_type = genomic DNA
gaatgatttcgactcat

SEQ ID NO: 65768 - DNA, 18 bp, Homo sapiens
  source 1..18: mol_type = genomic DNA
gaccacgtggcctaatgg

SEQ ID NO: 65769 - DNA, 19 bp, Homo sapiens
  source 1..19: mol_type = genomic DNA
gaccacgtggcctaatgga

SEQ ID NO: 65770 - DNA, 18 bp, Homo sapiens
  source 1..18: mol_type = genomic DNA
gacccagtggcctaatgg

SEQ ID NO: 65771 - DNA, 19 bp, Homo sapiens
  source 1..19: mol_type = genomic DNA
gacccagtggcctaatgga

SEQ ID NO: 65772 - DNA, 16 bp, Homo sapiens
  source 1..16: mol_type = genomic DNA
gaccccttatttaccc

SEQ ID NO: 65773 - DNA, 17 bp, Homo sapiens
  source 1..17: mol_type = genomic DNA
gaccccttatttacccc

SEQ ID NO: 65774 - DNA, 18 bp, Homo sapiens
  source 1..18: mol_type = genomic DNA
gaccccttatttacccca

SEQ ID NO: 65775 - DNA, 18 bp, Homo sapiens
  source 1..18: mol_type = genomic DNA
gaccgcgtggcctaatgg

SEQ ID NO: 65776 - DNA, 19 bp, Homo sapiens
  source 1..19: mol_type = genomic DNA
gaccgcgtggcctaatgga

SEQ ID NO: 65777 - DNA, 18 bp, Homo sapiens
  source 1..18: mol_type = genomic DNA
gacctcgtggcgcaacgg

SEQ ID NO: 65778 - DNA, 19 bp, Homo sapiens
  source 1..19: mol_type = genomic DNA
gacctcgtggcgcaacggt

SEQ ID NO: 65779 - DNA, 18 bp, Homo sapiens
  source 1..18: mol_type = genomic DNA
gacctcgtggcgcaatgg

SEQ ID NO: 65780 - DNA, 19 bp, Homo sapiens
  source 1..19: mol_type = genomic DNA
gacctcgtggcgcaatggt

SEQ ID NO: 65781 - DNA, 16 bp, Homo sapiens
  source 1..16: mol_type = genomic DNA
gacgaggtggccgagt

SEQ ID NO: 65782 - DNA, 18 bp, Homo sapiens
  source 1..18: mol_type = genomic DNA
gacgaggtggccgagtgg

SEQ ID NO: 65783 - DNA, 19 bp, Homo sapiens
  source 1..19: mol_type = genomic DNA
gacgaggtggccgagtggt

SEQ ID NO: 65784 - DNA, 23 bp, Homo sapiens
  source 1..23: mol_type = genomic DNA
gacgaggtggccgagtggttaag

SEQ ID NO: 65785 - DNA, 25 bp, Homo sapiens
  source 1..25: mol_type = genomic DNA
gacgaggtggccgagtggttaaggc

SEQ ID NO: 65786 - DNA, 17 bp, Homo sapiens
  source 1..17: mol_type = genomic DNA
gacgggctcacatcacc

SEQ ID NO: 65787 - DNA, 22 bp, Homo sapiens
  source 1..22: mol_type = genomic DNA
gactcaagttctggtctccgga

SEQ ID NO: 65788 - DNA, 18 bp, Homo sapiens
  source 1..18: mol_type = genomic DNA
gactcccggtgtgggaac

SEQ ID NO: 65789 - DNA, 19 bp, Homo sapiens
  source 1..19: mol_type = genomic DNA
gactcccggtgtgggaacc

SEQ ID NO: 65790 - DNA, 20 bp, Homo sapiens
  source 1..20: mol_type = genomic DNA
gactcccggtgtgggaacca

SEQ ID NO: 65791 - DNA, 16 bp, Homo sapiens
  source 1..16: mol_type = genomic DNA
gactttttctctgacc

SEQ ID NO: 65792 - DNA, 17 bp, Homo sapiens
  source 1..17: mol_type = genomic DNA
gactttttctctgacca

SEQ ID NO: 65793 - DNA, 16 bp, Homo sapiens
  source 1..16: mol_type = genomic DNA
gagaaagctcacaaga

SEQ ID NO: 65794 - DNA, 17 bp, Homo sapiens
  source 1..17: mol_type = genomic DNA
gagaaagctcacaagaa

SEQ ID NO: 65795 - DNA, 18 bp, Homo sapiens
  source 1..18: mol_type = genomic DNA
gagaaagctcacaagaac

SEQ ID NO: 65796 - DNA, 19 bp, Homo sapiens
  source 1..19: mol_type = genomic DNA
gagaaagctcacaagaact

SEQ ID NO: 65797 - DNA, 20 bp, Homo sapiens
  source 1..20: mol_type = genomic DNA
gagaaagctcacaagaactg

SEQ ID NO: 65798 - DNA, 21 bp, Homo sapiens
  source 1..21: mol_type = genomic DNA
gagaaagctcacaagaactgc

SEQ ID NO: 65799 - DNA, 22 bp, Homo sapiens
  source 1..22: mol_type = genomic DNA
gagaaagctcacaagaactgct

SEQ ID NO: 65800 - DNA, 23 bp, Homo sapiens
  source 1..23: mol_type = genomic DNA
gagaaagctcacaagaactgcta

SEQ ID NO: 65801 - DNA, 24 bp, Homo sapiens
  source 1..24: mol_type = genomic DNA
gagaaagctcacaagaactgctaa

SEQ ID NO: 65802 - DNA, 25 bp, Homo sapiens
  source 1..25: mol_type = genomic DNA
gagaaagctcacaagaactgctaac

SEQ ID NO: 65803 - DNA, 18 bp, Homo sapiens
  source 1..18: mol_type = genomic DNA
gagaatagtttaaattag

SEQ ID NO: 65804 - DNA, 16 bp, Homo sapiens
  source 1..16: mol_type = genomic DNA
gagaggtcccgggttc

SEQ ID NO: 65805 - DNA, 19 bp, Homo sapiens
  source 1..19: mol_type = genomic DNA
gagatgaaaacctttttcc

SEQ ID NO: 65806 - DNA, 20 bp, Homo sapiens
  source 1..20: mol_type = genomic DNA
gagcccacccagggacgcca

SEQ ID NO: 65807 - DNA, 18 bp, Homo sapiens
  source 1..18: mol_type = genomic DNA
gagcccggtaatcgcata

SEQ ID NO: 65808 - DNA, 25 bp, Homo sapiens
  source 1..25: mol_type = genomic DNA
gagcttaaacccccttatttctacc

SEQ ID NO: 65809 - DNA, 18 bp, Homo sapiens
  source 1..18: mol_type = genomic DNA
gaggtgattttcatattg

SEQ ID NO: 65810 - DNA, 24 bp, Homo sapiens
  source 1..24: mol_type = genomic DNA
gaggttccgggttcgagtcccggc

SEQ ID NO: 65811 - DNA, 19 bp, Homo sapiens
  source 1..19: mol_type = genomic DNA
gagtaaataataggagctt

SEQ ID NO: 65812 - DNA, 21 bp, Homo sapiens
  source 1..21: mol_type = genomic DNA
gagtaaataataggagcttaa

SEQ ID NO: 65813 - DNA, 16 bp, Homo sapiens
  source 1..16: mol_type = genomic DNA
gagtatccccgcctgt

SEQ ID NO: 65814 - DNA, 16 bp, Homo sapiens
  source 1..16: mol_type = genomic DNA
gagtgaagcattggac

SEQ ID NO: 65815 - DNA, 17 bp, Homo sapiens
  source 1..17: mol_type = genomic DNA
gagtgaagcattggact

SEQ ID NO: 65816 - DNA, 18 bp, Homo sapiens
  source 1..18: mol_type = genomic DNA
gagtgaagcattggactg

SEQ ID NO: 65817 - DNA, 19 bp, Homo sapiens
  source 1..19: mol_type = genomic DNA
gagtgaagcattggactgt

SEQ ID NO: 65818 - DNA, 20 bp, Homo sapiens
  source 1..20: mol_type = genomic DNA
gagtgaagcattggactgta

SEQ ID NO: 65819 - DNA, 18 bp, Homo sapiens
  source 1..18: mol_type = genomic DNA
gagtggggttttgcagtc

SEQ ID NO: 65820 - DNA, 16 bp, Homo sapiens
  source 1..16: mol_type = genomic DNA
gagtgtagcttaacac

SEQ ID NO: 65821 - DNA, 17 bp, Homo sapiens
  source 1..17: mol_type = genomic DNA
gagtgtagcttaacaca

SEQ ID NO: 65822 - DNA, 22 bp, Homo sapiens
  source 1..22: mol_type = genomic DNA
gagttaaagactttttctctga

SEQ ID NO: 65823 - DNA, 23 bp, Homo sapiens
  source 1..23: mol_type = genomic DNA
gagttaaagactttttctctgac

SEQ ID NO: 65824 - DNA, 24 bp, Homo sapiens
  source 1..24: mol_type = genomic DNA
gagttaaagactttttctctgacc

SEQ ID NO: 65825 - DNA, 19 bp, Homo sapiens
  source 1..19: mol_type = genomic DNA
gagttcaaatctcggtgga

SEQ ID NO: 65826 - DNA, 20 bp, Homo sapiens
  source 1..20: mol_type = genomic DNA
gagttcaaatctcggtggaa

SEQ ID NO: 65827 - DNA, 21 bp, Homo sapiens
  source 1..21: mol_type = genomic DNA
gagttcaaatctcggtggaac

SEQ ID NO: 65828 - DNA, 22 bp, Homo sapiens
  source 1..22: mol_type = genomic DNA
gagttcaaatctcggtggaacc

SEQ ID NO: 65829 - DNA, 23 bp, Homo sapiens
  source 1..23: mol_type = genomic DNA
gagttcaaatctcggtggaacct

SEQ ID NO: 65830 - DNA, 24 bp, Homo sapiens
  source 1..24: mol_type = genomic DNA
gagttcaaatctcggtggaacctc

SEQ ID NO: 65831 - DNA, 25 bp, Homo sapiens
  source 1..25: mol_type = genomic DNA
gagttcaaatctcggtggaacctcc

SEQ ID NO: 65832 - DNA, 20 bp, Homo sapiens
  source 1..20: mol_type = genomic DNA
gagttcaaatctcggtggga

SEQ ID NO: 65833 - DNA, 21 bp, Homo sapiens
  source 1..21: mol_type = genomic DNA
gagttcaaatctcggtgggac

SEQ ID NO: 65834 - DNA, 22 bp, Homo sapiens
  source 1..22: mol_type = genomic DNA
gagttcaaatctcggtgggacc

SEQ ID NO: 65835 - DNA, 23 bp, Homo sapiens
  source 1..23: mol_type = genomic DNA
gagttcaaatctcggtgggacct

SEQ ID NO: 65836 - DNA, 21 bp, Homo sapiens
  source 1..21: mol_type = genomic DNA
gagttcgaatctcggtgggac

SEQ ID NO: 65837 - DNA, 22 bp, Homo sapiens
  source 1..22: mol_type = genomic DNA
gagttcgaatctcggtgggacc

SEQ ID NO: 65838 - DNA, 20 bp, Homo sapiens
  source 1..20: mol_type = genomic DNA
gagttcgagtctcggtggaa

SEQ ID NO: 65839 - DNA, 21 bp, Homo sapiens
  source 1..21: mol_type = genomic DNA
gagttcgagtctcggtggaac

SEQ ID NO: 65840 - DNA, 23 bp, Homo sapiens
  source 1..23: mol_type = genomic DNA
gagttcgagtctcggtggaacct

SEQ ID NO: 65841 - DNA, 21 bp, Homo sapiens
  source 1..21: mol_type = genomic DNA
gataacagctatccattggtc

SEQ ID NO: 65842 - DNA, 19 bp, Homo sapiens
  source 1..19: mol_type = genomic DNA
gataatcatatttaccaac

SEQ ID NO: 65843 - DNA, 20 bp, Homo sapiens
  source 1..20: mol_type = genomic DNA
gataatcatatttaccaacc

SEQ ID NO: 65844 - DNA, 21 bp, Homo sapiens
  source 1..21: mol_type = genomic DNA
gataatcatatttaccaacca

SEQ ID NO: 65845 - DNA, 19 bp, Homo sapiens
  source 1..19: mol_type = genomic DNA
gatagagtaaataatagga

SEQ ID NO: 65846 - DNA, 20 bp, Homo sapiens
  source 1..20: mol_type = genomic DNA
gatccccggcatctccacca

SEQ ID NO: 65847 - DNA, 17 bp, Homo sapiens
  source 1..17: mol_type = genomic DNA
gatggccgagcggtcta

SEQ ID NO: 65848 - DNA, 20 bp, Homo sapiens
  source 1..20: mol_type = genomic DNA
gatggggtgtgataggtggc

SEQ ID NO: 65849 - DNA, 16 bp, Homo sapiens
  source 1..16: mol_type = genomic DNA
gattaagagaaccaac

SEQ ID NO: 65850 - DNA, 17 bp, Homo sapiens
  source 1..17: mol_type = genomic DNA
gattaagagaaccaaca

SEQ ID NO: 65851 - DNA, 20 bp, Homo sapiens
  source 1..20: mol_type = genomic DNA
gattcccggccaacgcacca

SEQ ID NO: 65852 - DNA, 20 bp, Homo sapiens
  source 1..20: mol_type = genomic DNA
gattcccgggcggcgcacca

SEQ ID NO: 65853 - DNA, 17 bp, Homo sapiens
  source 1..17: mol_type = genomic DNA
gattccggatcagaaga

SEQ ID NO: 65854 - DNA, 19 bp, Homo sapiens
  source 1..19: mol_type = genomic DNA
gattccggctcgaaggacc

SEQ ID NO: 65855 - DNA, 20 bp, Homo sapiens
  source 1..20: mol_type = genomic DNA
gattccggctcgaaggacca

SEQ ID NO: 65856 - DNA, 19 bp, Homo sapiens
  source 1..19: mol_type = genomic DNA
gattctcatagtcctagcc

SEQ ID NO: 65857 - DNA, 20 bp, Homo sapiens
  source 1..20: mol_type = genomic DNA
gattctcatagtcctagcca

SEQ ID NO: 65858 - DNA, 19 bp, Homo sapiens
  source 1..19: mol_type = genomic DNA
gattgagggttcgagtccc

SEQ ID NO: 65859 - DNA, 20 bp, Homo sapiens
  source 1..20: mol_type = genomic DNA
gattgagggttcgagtccct

SEQ ID NO: 65860 - DNA, 22 bp, Homo sapiens
  source 1..22: mol_type = genomic DNA
gattgagggttcgagtcccttc

SEQ ID NO: 65861 - DNA, 23 bp, Homo sapiens
  source 1..23: mol_type = genomic DNA
gattgagggttcgagtcccttcg

SEQ ID NO: 65862 - DNA, 16 bp, Homo sapiens
  source 1..16: mol_type = genomic DNA
gattgtgaatctgaca

SEQ ID NO: 65863 - DNA, 17 bp, Homo sapiens
  source 1..17: mol_type = genomic DNA
gattgtgaatctgacaa

SEQ ID NO: 65864 - DNA, 18 bp, Homo sapiens
  source 1..18: mol_type = genomic DNA
gattgtgaatctgacaac

SEQ ID NO: 65865 - DNA, 19 bp, Homo sapiens
  source 1..19: mol_type = genomic DNA
gattgtgaatctgacaaca

SEQ ID NO: 65866 - DNA, 20 bp, Homo sapiens
  source 1..20: mol_type = genomic DNA
gattgtgaatctgacaacag

SEQ ID NO: 65867 - DNA, 21 bp, Homo sapiens
  source 1..21: mol_type = genomic DNA
gattgtgaatctgacaacaga

SEQ ID NO: 65868 - DNA, 22 bp, Homo sapiens
  source 1..22: mol_type = genomic DNA
gattgtgaatctgacaacagag

SEQ ID NO: 65869 - DNA, 20 bp, Homo sapiens
  source 1..20: mol_type = genomic DNA
gatttcaacttaacttgacc

SEQ ID NO: 65870 - DNA, 25 bp, Homo sapiens
  source 1..25: mol_type = genomic DNA
gatttcaacttaacttgaccgctct

SEQ ID NO: 65871 - DNA, 18 bp, Homo sapiens
  source 1..18: mol_type = genomic DNA
gatttcgactcattaaat

SEQ ID NO: 65872 - DNA, 19 bp, Homo sapiens
  source 1..19: mol_type = genomic DNA
gatttcgactcattaaatt

SEQ ID NO: 65873 - DNA, 20 bp, Homo sapiens
  source 1..20: mol_type = genomic DNA
gcaactccaaataaaagtac

SEQ ID NO: 65874 - DNA, 21 bp, Homo sapiens
  source 1..21: mol_type = genomic DNA
gcaactccaaataaaagtacc

SEQ ID NO: 65875 - DNA, 19 bp, Homo sapiens
  source 1..19: mol_type = genomic DNA
gcaatacttaatttctgcc

SEQ ID NO: 65876 - DNA, 20 bp, Homo sapiens
  source 1..20: mol_type = genomic DNA
gcaatacttaatttctgcca

SEQ ID NO: 65877 - DNA, 19 bp, Homo sapiens
  source 1..19: mol_type = genomic DNA
gcaatggatagcgcattgg

SEQ ID NO: 65878 - DNA, 18 bp, Homo sapiens
  source 1..18: mol_type = genomic DNA
gcacccaacttacactta

SEQ ID NO: 65879 - DNA, 23 bp, Homo sapiens
  source 1..23: mol_type = genomic DNA
gcacccaacttacacttaggaga

SEQ ID NO: 65880 - DNA, 19 bp, Homo sapiens
  source 1..19: mol_type = genomic DNA
gcactctggactctgaatc

SEQ ID NO: 65881 - DNA, 20 bp, Homo sapiens
  source 1..20: mol_type = genomic DNA
gcactctggactctgaatcc

SEQ ID NO: 65882 - DNA, 21 bp, Homo sapiens
  source 1..21: mol_type = genomic DNA
gcactctggactctgaatcca

SEQ ID NO: 65883 - DNA, 17 bp, Homo sapiens
  source 1..17: mol_type = genomic DNA
gcagagcccggtaatcg

SEQ ID NO: 65884 - DNA, 18 bp, Homo sapiens
  source 1..18: mol_type = genomic DNA
gcagcgatggccgagtgg

SEQ ID NO: 65885 - DNA, 19 bp, Homo sapiens
  source 1..19: mol_type = genomic DNA
gcataaaacttaaaacttt

SEQ ID NO: 65886 - DNA, 16 bp, Homo sapiens
  source 1..16: mol_type = genomic DNA
gcatgagactcttaat

SEQ ID NO: 65887 - DNA, 17 bp, Homo sapiens
  source 1..17: mol_type = genomic DNA
gcatgagactcttaatc

SEQ ID NO: 65888 - DNA, 18 bp, Homo sapiens
  source 1..18: mol_type = genomic DNA
gcatgagactcttaatct

SEQ ID NO: 65889 - DNA, 19 bp, Homo sapiens
  source 1..19: mol_type = genomic DNA
gcatgagactcttaatctc

SEQ ID NO: 65890 - DNA, 16 bp, Homo sapiens
  source 1..16: mol_type = genomic DNA
gcatgggactcttaat

SEQ ID NO: 65891 - DNA, 17 bp, Homo sapiens
  source 1..17: mol_type = genomic DNA
gcatgggactcttaatc

SEQ ID NO: 65892 - DNA, 18 bp, Homo sapiens
  source 1..18: mol_type = genomic DNA
gcatgggactcttaatcc

SEQ ID NO: 65893 - DNA, 19 bp, Homo sapiens
  source 1..19: mol_type = genomic DNA
gcatgggactcttaatccc

SEQ ID NO: 65894 - DNA, 18 bp, Homo sapiens
  source 1..18: mol_type = genomic DNA
gcatgggtggttcagtgg

SEQ ID NO: 65895 - DNA, 17 bp, Homo sapiens
  source 1..17: mol_type = genomic DNA
gcattaaccttttaagt

SEQ ID NO: 65896 - DNA, 19 bp, Homo sapiens
  source 1..19: mol_type = genomic DNA
gcattaaccttttaagtta

SEQ ID NO: 65897 - DNA, 16 bp, Homo sapiens
  source 1..16: mol_type = genomic DNA
gcattggtggttcagt

SEQ ID NO: 65898 - DNA, 17 bp, Homo sapiens
  source 1..17: mol_type = genomic DNA
gcattggtggttcagtg

SEQ ID NO: 65899 - DNA, 18 bp, Homo sapiens
  source 1..18: mol_type = genomic DNA
gcattggtggttcagtgg

SEQ ID NO: 65900 - DNA, 19 bp, Homo sapiens
  source 1..19: mol_type = genomic DNA
gcattggtggttcagtggt

SEQ ID NO: 65901 - DNA, 20 bp, Homo sapiens
  source 1..20: mol_type = genomic DNA
gcattggtggttcagtggta

SEQ ID NO: 65902 - DNA, 21 bp, Homo sapiens
  source 1..21: mol_type = genomic DNA
gcattggtggttcagtggtag

SEQ ID NO: 65903 - DNA, 22 bp, Homo sapiens
  source 1..22: mol_type = genomic DNA
gcattggtggttcagtggtaga

SEQ ID NO: 65904 - DNA, 23 bp, Homo sapiens
  source 1..23: mol_type = genomic DNA
gcattggtggttcagtggtagaa

SEQ ID NO: 65905 - DNA, 24 bp, Homo sapiens
  source 1..24: mol_type = genomic DNA
gcattggtggttcagtggtagaat

SEQ ID NO: 65906 - DNA, 25 bp, Homo sapiens
  source 1..25: mol_type = genomic DNA
gcattggtggttcagtggtagaatt

SEQ ID NO: 65907 - DNA, 18 bp, Homo sapiens
  source 1..18: mol_type = genomic DNA
gccagggattgtgggttc

SEQ ID NO: 65908 - DNA, 17 bp, Homo sapiens
  source 1..17: mol_type = genomic DNA
gccagtggcgcaatgga

SEQ ID NO: 65909 - DNA, 17 bp, Homo sapiens
  source 1..17: mol_type = genomic DNA
gcccacccagggacgcc

SEQ ID NO: 65910 - DNA, 18 bp, Homo sapiens
  source 1..18: mol_type = genomic DNA
gcccacccagggacgcca

SEQ ID NO: 65911 - DNA, 18 bp, Homo sapiens
  source 1..18: mol_type = genomic DNA
gccccagtggaaccacca

SEQ ID NO: 65912 - DNA, 18 bp, Homo sapiens
  source 1..18: mol_type = genomic DNA
gccccagtggcctaatgg

SEQ ID NO: 65913 - DNA, 19 bp, Homo sapiens
  source 1..19: mol_type = genomic DNA
gccccagtggcctaatgga

SEQ ID NO: 65914 - DNA, 18 bp, Homo sapiens
  source 1..18: mol_type = genomic DNA
gcccccatgtctaacaac

SEQ ID NO: 65915 - DNA, 19 bp, Homo sapiens
  source 1..19: mol_type = genomic DNA
gcccccatgtctaacaaca

SEQ ID NO: 65916 - DNA, 23 bp, Homo sapiens
  source 1..23: mol_type = genomic DNA
gcccccatgtctaacaacatggc

SEQ ID NO: 65917 - DNA, 24 bp, Homo sapiens
  source 1..24: mol_type = genomic DNA
gcccccatgtctaacaacatggct

SEQ ID NO: 65918 - DNA, 25 bp, Homo sapiens
  source 1..25: mol_type = genomic DNA
gcccccatgtctaacaacatggctt

SEQ ID NO: 65919 - DNA, 19 bp, Homo sapiens
  source 1..19: mol_type = genomic DNA
gccccggtggcctaatgga

SEQ ID NO: 65920 - DNA, 17 bp, Homo sapiens
  source 1..17: mol_type = genomic DNA
gcccgcatcctccacca

SEQ ID NO: 65921 - DNA, 16 bp, Homo sapiens
  source 1..16: mol_type = genomic DNA
gcccggatagctcagt

SEQ ID NO: 65922 - DNA, 17 bp, Homo sapiens
  source 1..17: mol_type = genomic DNA
gcccggatagctcagtc

SEQ ID NO: 65923 - DNA, 18 bp, Homo sapiens
  source 1..18: mol_type = genomic DNA
gcccggatagctcagtcg

SEQ ID NO: 65924 - DNA, 19 bp, Homo sapiens
  source 1..19: mol_type = genomic DNA
gcccggatagctcagtcgg

SEQ ID NO: 65925 - DNA, 20 bp, Homo sapiens
  source 1..20: mol_type = genomic DNA
gcccggatagctcagtcggt

SEQ ID NO: 65926 - DNA, 21 bp, Homo sapiens
  source 1..21: mol_type = genomic DNA
gcccggatagctcagtcggta

SEQ ID NO: 65927 - DNA, 22 bp, Homo sapiens
  source 1..22: mol_type = genomic DNA
gcccggatagctcagtcggtag

SEQ ID NO: 65928 - DNA, 23 bp, Homo sapiens
  source 1..23: mol_type = genomic DNA
gcccggatagctcagtcggtaga

SEQ ID NO: 65929 - DNA, 25 bp, Homo sapiens
  source 1..25: mol_type = genomic DNA
gcccggatagctcagtcggtagagc

SEQ ID NO: 65930 - DNA, 16 bp, Homo sapiens
  source 1..16: mol_type = genomic DNA
gcccggctagctcagt

SEQ ID NO: 65931 - DNA, 17 bp, Homo sapiens
  source 1..17: mol_type = genomic DNA
gcccggctagctcagtc

SEQ ID NO: 65932 - DNA, 18 bp, Homo sapiens
  source 1..18: mol_type = genomic DNA
gcccggctagctcagtcg

SEQ ID NO: 65933 - DNA, 19 bp, Homo sapiens
  source 1..19: mol_type = genomic DNA
gcccggctagctcagtcgg

SEQ ID NO: 65934 - DNA, 20 bp, Homo sapiens
  source 1..20: mol_type = genomic DNA
gcccggctagctcagtcggt

SEQ ID NO: 65935 - DNA, 23 bp, Homo sapiens
  source 1..23: mol_type = genomic DNA
gcccggctagctcagtcggtaga

SEQ ID NO: 65936 - DNA, 19 bp, Homo sapiens
  source 1..19: mol_type = genomic DNA
gccgaaatagctcagttgg

SEQ ID NO: 65937 - DNA, 20 bp, Homo sapiens
  source 1..20: mol_type = genomic DNA
gccgaaatagctcagttggg

SEQ ID NO: 65938 - DNA, 17 bp, Homo sapiens
  source 1..17: mol_type = genomic DNA
gccgaggttgtgagttc

SEQ ID NO: 65939 - DNA, 18 bp, Homo sapiens
  source 1..18: mol_type = genomic DNA
gccgcgtggcctaatgga

SEQ ID NO: 65940 - DNA, 25 bp, Homo sapiens
  source 1..25: mol_type = genomic DNA
gccgctggtgtagtggtatcatgca

SEQ ID NO: 65941 - DNA, 18 bp, Homo sapiens
  source 1..18: mol_type = genomic DNA
gccgtgatcgtatagtgg

SEQ ID NO: 65942 - DNA, 19 bp, Homo sapiens
  source 1..19: mol_type = genomic DNA
gccgtgatcgtatagtggt

SEQ ID NO: 65943 - DNA, 19 bp, Homo sapiens
  source 1..19: mol_type = genomic DNA
gcctccttagcgcagtagg

SEQ ID NO: 65944 - DNA, 19 bp, Homo sapiens
  source 1..19: mol_type = genomic DNA
gcctcgttagcgcagtagg

SEQ ID NO: 65945 - DNA, 19 bp, Homo sapiens
  source 1..19: mol_type = genomic DNA
gcctggatagctcagtcgg

SEQ ID NO: 65946 - DNA, 19 bp, Homo sapiens
  source 1..19: mol_type = genomic DNA
gcctggatagctcagttgg

SEQ ID NO: 65947 - DNA, 20 bp, Homo sapiens
  source 1..20: mol_type = genomic DNA
gcctggatagctcagttggt

SEQ ID NO: 65948 - DNA, 19 bp, Homo sapiens
  source 1..19: mol_type = genomic DNA
gcctgggtagctcagtcgg

SEQ ID NO: 65949 - DNA, 16 bp, Homo sapiens
  source 1..16: mol_type = genomic DNA
gcgaaaggtccccggt

SEQ ID NO: 65950 - DNA, 24 bp, Homo sapiens
  source 1..24: mol_type = genomic DNA
gcgacccgggttcgattcccgggc

SEQ ID NO: 65951 - DNA, 16 bp, Homo sapiens
  source 1..16: mol_type = genomic DNA
gcgccgctggtgtagt

SEQ ID NO: 65952 - DNA, 17 bp, Homo sapiens
  source 1..17: mol_type = genomic DNA
gcgccgctggtgtagtg

SEQ ID NO: 65953 - DNA, 18 bp, Homo sapiens
  source 1..18: mol_type = genomic DNA
gcgccgctggtgtagtgg

SEQ ID NO: 65954 - DNA, 19 bp, Homo sapiens
  source 1..19: mol_type = genomic DNA
gcgccgctggtgtagtggt

SEQ ID NO: 65955 - DNA, 20 bp, Homo sapiens
  source 1..20: mol_type = genomic DNA
gcgccgctggtgtagtggta

SEQ ID NO: 65956 - DNA, 21 bp, Homo sapiens
  source 1..21: mol_type = genomic DNA
gcgccgctggtgtagtggtat

SEQ ID NO: 65957 - DNA, 22 bp, Homo sapiens
  source 1..22: mol_type = genomic DNA
gcgccgctggtgtagtggtatc

SEQ ID NO: 65958 - DNA, 22 bp, Homo sapiens
  source 1..22: mol_type = genomic DNA
gcggttaggattcctggttttc

SEQ ID NO: 65959 - DNA, 20 bp, Homo sapiens
  source 1..20: mol_type = genomic DNA
gcgttcaggtcgcagtctcc

SEQ ID NO: 65960 - DNA, 21 bp, Homo sapiens
  source 1..21: mol_type = genomic DNA
gcgttcaggtcgcagtctccc

SEQ ID NO: 65961 - DNA, 16 bp, Homo sapiens
  source 1..16: mol_type = genomic DNA
gcgttggtggtatagt

SEQ ID NO: 65962 - DNA, 18 bp, Homo sapiens
  source 1..18: mol_type = genomic DNA
gcgttggtggtatagtgg

SEQ ID NO: 65963 - DNA, 19 bp, Homo sapiens
  source 1..19: mol_type = genomic DNA
gcgttggtggtatagtggt

SEQ ID NO: 65964 - DNA, 17 bp, Homo sapiens
  source 1..17: mol_type = genomic DNA
gctaaataagctatcgg

SEQ ID NO: 65965 - DNA, 18 bp, Homo sapiens
  source 1..18: mol_type = genomic DNA
gctaaataagctatcggg

SEQ ID NO: 65966 - DNA, 21 bp, Homo sapiens
  source 1..21: mol_type = genomic DNA
gctaaataagctatcgggccc

SEQ ID NO: 65967 - DNA, 17 bp, Homo sapiens
  source 1..17: mol_type = genomic DNA
gctaaatcctatatatc

SEQ ID NO: 65968 - DNA, 17 bp, Homo sapiens
  source 1..17: mol_type = genomic DNA
gctaatggtggagttaa

SEQ ID NO: 65969 - DNA, 21 bp, Homo sapiens
  source 1..21: mol_type = genomic DNA
gctaatggtggagttaaagac

SEQ ID NO: 65970 - DNA, 18 bp, Homo sapiens
  source 1..18: mol_type = genomic DNA
gctagctcagtcggtaga

SEQ ID NO: 65971 - DNA, 20 bp, Homo sapiens
  source 1..20: mol_type = genomic DNA
gctagctcagtcggtagagc

SEQ ID NO: 65972 - DNA, 19 bp, Homo sapiens
  source 1..19: mol_type = genomic DNA
gctaggattcggcgctttc

SEQ ID NO: 65973 - DNA, 16 bp, Homo sapiens
  source 1..16: mol_type = genomic DNA
gctatcgggcccatac

SEQ ID NO: 65974 - DNA, 17 bp, Homo sapiens
  source 1..17: mol_type = genomic DNA
gctatcgggcccatacc

SEQ ID NO: 65975 - DNA, 18 bp, Homo sapiens
  source 1..18: mol_type = genomic DNA
gctatcgggcccataccc

SEQ ID NO: 65976 - DNA, 19 bp, Homo sapiens
  source 1..19: mol_type = genomic DNA
gctatcgggcccatacccc

SEQ ID NO: 65977 - DNA, 21 bp, Homo sapiens
  source 1..21: mol_type = genomic DNA
gctatcgggcccataccccga

SEQ ID NO: 65978 - DNA, 22 bp, Homo sapiens
  source 1..22: mol_type = genomic DNA
gctatcgggcccataccccgaa

SEQ ID NO: 65979 - DNA, 23 bp, Homo sapiens
  source 1..23: mol_type = genomic DNA
gctatcgggcccataccccgaaa

SEQ ID NO: 65980 - DNA, 16 bp, Homo sapiens
  source 1..16: mol_type = genomic DNA
gctcacaagaactgct

SEQ ID NO: 65981 - DNA, 17 bp, Homo sapiens
  source 1..17: mol_type = genomic DNA
gctcacaagaactgcta

SEQ ID NO: 65982 - DNA, 18 bp, Homo sapiens
  source 1..18: mol_type = genomic DNA
gctcacaagaactgctaa

SEQ ID NO: 65983 - DNA, 19 bp, Homo sapiens
  source 1..19: mol_type = genomic DNA
gctcacaagaactgctaac

SEQ ID NO: 65984 - DNA, 20 bp, Homo sapiens
  source 1..20: mol_type = genomic DNA
gctcacaagaactgctaact

SEQ ID NO: 65985 - DNA, 21 bp, Homo sapiens
  source 1..21: mol_type = genomic DNA
gctcacaagaactgctaactc

SEQ ID NO: 65986 - DNA, 22 bp, Homo sapiens
  source 1..22: mol_type = genomic DNA
gctcacaagaactgctaactca

SEQ ID NO: 65987 - DNA, 18 bp, Homo sapiens
  source 1..18: mol_type = genomic DNA
gctcacatcaccccataa

SEQ ID NO: 65988 - DNA, 21 bp, Homo sapiens
  source 1..21: mol_type = genomic DNA
gctcacatcaccccataaaca

SEQ ID NO: 65989 - DNA, 24 bp, Homo sapiens
  source 1..24: mol_type = genomic DNA
gctcacatcaccccataaacacca

SEQ ID NO: 65990 - DNA, 23 bp, Homo sapiens
  source 1..23: mol_type = genomic DNA
gctcagtcggtagagcatgggac

SEQ ID NO: 65991 - DNA, 20 bp, Homo sapiens
  source 1..20: mol_type = genomic DNA
gctccagtctcttcgggggc

SEQ ID NO: 65992 - DNA, 18 bp, Homo sapiens
  source 1..18: mol_type = genomic DNA
gctccagtggcgcaatcg

SEQ ID NO: 65993 - DNA, 19 bp, Homo sapiens
  source 1..19: mol_type = genomic DNA
gctccagtggcgcaatcgg

SEQ ID NO: 65994 - DNA, 20 bp, Homo sapiens
  source 1..20: mol_type = genomic DNA
gctccagtggcgcaatcggt

SEQ ID NO: 65995 - DNA, 17 bp, Homo sapiens
  source 1..17: mol_type = genomic DNA
gctccgaggtgattttc

SEQ ID NO: 65996 - DNA, 18 bp, Homo sapiens
  source 1..18: mol_type = genomic DNA
gctccgaggtgattttca

SEQ ID NO: 65997 - DNA, 23 bp, Homo sapiens
  source 1..23: mol_type = genomic DNA
gctccgaggtgattttcatattg

SEQ ID NO: 65998 - DNA, 18 bp, Homo sapiens
  source 1..18: mol_type = genomic DNA
gctccgtggcgcaatgga

SEQ ID NO: 65999 - DNA, 19 bp, Homo sapiens
  source 1..19: mol_type = genomic DNA
gctgagtgaagcattggac

SEQ ID NO: 66000 - DNA, 22 bp, Homo sapiens
  source 1..22: mol_type = genomic DNA
gctgagtgaagcattggactgt

SEQ ID NO: 66001 - DNA, 23 bp, Homo sapiens
  source 1..23: mol_type = genomic DNA
gctgagtgaagcattggactgta

SEQ ID NO: 66002 - DNA, 16 bp, Homo sapiens
  source 1..16: mol_type = genomic DNA
gctggtgtagtggtat

SEQ ID NO: 66003 - DNA, 17 bp, Homo sapiens
  source 1..17: mol_type = genomic DNA
gctggtgtagtggtatc

SEQ ID NO: 66004 - DNA, 18 bp, Homo sapiens
  source 1..18: mol_type = genomic DNA
gctggtgtagtggtatca

SEQ ID NO: 66005 - DNA, 19 bp, Homo sapiens
  source 1..19: mol_type = genomic DNA
gctggtgtagtggtatcat

SEQ ID NO: 66006 - DNA, 20 bp, Homo sapiens
  source 1..20: mol_type = genomic DNA
gctggtgtagtggtatcatg

SEQ ID NO: 66007 - DNA, 21 bp, Homo sapiens
  source 1..21: mol_type = genomic DNA
gctggtgtagtggtatcatgc

SEQ ID NO: 66008 - DNA, 24 bp, Homo sapiens
  source 1..24: mol_type = genomic DNA
gctggtgtagtggtatcatgcaag

SEQ ID NO: 66009 - DNA, 25 bp, Homo sapiens
  source 1..25: mol_type = genomic DNA
gctggtgtagtggtatcatgcaaga

SEQ ID NO: 66010 - DNA, 18 bp, Homo sapiens
  source 1..18: mol_type = genomic DNA
gctgtgatggccgagtgg

SEQ ID NO: 66011 - DNA, 19 bp, Homo sapiens
  source 1..19: mol_type = genomic DNA
gctgtgatggccgagtggt

SEQ ID NO: 66012 - DNA, 23 bp, Homo sapiens
  source 1..23: mol_type = genomic DNA
gctgtgatggccgagtggttaag

SEQ ID NO: 66013 - DNA, 16 bp, Homo sapiens
  source 1..16: mol_type = genomic DNA
gcttaaacccccttat

SEQ ID NO: 66014 - DNA, 17 bp, Homo sapiens
  source 1..17: mol_type = genomic DNA
gcttaaacccccttatt

SEQ ID NO: 66015 - DNA, 20 bp, Homo sapiens
  source 1..20: mol_type = genomic DNA
gcttaaacccccttatttct

SEQ ID NO: 66016 - DNA, 21 bp, Homo sapiens
  source 1..21: mol_type = genomic DNA
gcttaaacccccttatttcta

SEQ ID NO: 66017 - DNA, 22 bp, Homo sapiens
  source 1..22: mol_type = genomic DNA
gcttaaacccccttatttctac

SEQ ID NO: 66018 - DNA, 23 bp, Homo sapiens
  source 1..23: mol_type = genomic DNA
gcttaaacccccttatttctacc

SEQ ID NO: 66019 - DNA, 24 bp, Homo sapiens
  source 1..24: mol_type = genomic DNA
gcttaaacccccttatttctacca

SEQ ID NO: 66020 - DNA, 23 bp, Homo sapiens
  source 1..23: mol_type = genomic DNA
gcttacgaccccttatttacccc

SEQ ID NO: 66021 - DNA, 17 bp, Homo sapiens
  source 1..17: mol_type = genomic DNA
gcttcaaacctgccggg

SEQ ID NO: 66022 - DNA, 19 bp, Homo sapiens
  source 1..19: mol_type = genomic DNA
gcttcaaacctgccggggc

SEQ ID NO: 66023 - DNA, 21 bp, Homo sapiens
  source 1..21: mol_type = genomic DNA
gcttcaaacctgccggggctt

SEQ ID NO: 66024 - DNA, 22 bp, Homo sapiens
  source 1..22: mol_type = genomic DNA
gcttcaaacctgccggggcttc

SEQ ID NO: 66025 - DNA, 23 bp, Homo sapiens
  source 1..23: mol_type = genomic DNA
gcttcaaacctgccggggcttcc

SEQ ID NO: 66026 - DNA, 19 bp, Homo sapiens
  source 1..19: mol_type = genomic DNA
gcttctgtagtgtagtggt

SEQ ID NO: 66027 - DNA, 17 bp, Homo sapiens
  source 1..17: mol_type = genomic DNA
gctttgcacgcgtgggt

SEQ ID NO: 66028 - DNA, 17 bp, Homo sapiens
  source 1..17: mol_type = genomic DNA
ggaagcgtgctgggccc

SEQ ID NO: 66029 - DNA, 20 bp, Homo sapiens
  source 1..20: mol_type = genomic DNA
ggagatgaaaacctttttcc

SEQ ID NO: 66030 - DNA, 24 bp, Homo sapiens
  source 1..24: mol_type = genomic DNA
ggagttaaagactttttctctgac

SEQ ID NO: 66031 - DNA, 25 bp, Homo sapiens
  source 1..25: mol_type = genomic DNA
ggagttaaagactttttctctgacc

SEQ ID NO: 66032 - DNA, 19 bp, Homo sapiens
  source 1..19: mol_type = genomic DNA
ggatagctcagtcggtaga

SEQ ID NO: 66033 - DNA, 24 bp, Homo sapiens
  source 1..24: mol_type = genomic DNA
ggatagctcagtcggtagagcatc

SEQ ID NO: 66034 - DNA, 22 bp, Homo sapiens
  source 1..22: mol_type = genomic DNA
ggatcagaagattgagggttcg

SEQ ID NO: 66035 - DNA, 16 bp, Homo sapiens
  source 1..16: mol_type = genomic DNA
ggatggaggcgtgggt

SEQ ID NO: 66036 - DNA, 17 bp, Homo sapiens
  source 1..17: mol_type = genomic DNA
ggatggaggcgtgggtt

SEQ ID NO: 66037 - DNA, 18 bp, Homo sapiens
  source 1..18: mol_type = genomic DNA
ggatggccgagtggtcta

SEQ ID NO: 66038 - DNA, 18 bp, Homo sapiens
  source 1..18: mol_type = genomic DNA
ggccagtggcgcaatgga

SEQ ID NO: 66039 - DNA, 19 bp, Homo sapiens
  source 1..19: mol_type = genomic DNA
ggccccatggtgtaatggt

SEQ ID NO: 66040 - DNA, 18 bp, Homo sapiens
  source 1..18: mol_type = genomic DNA
ggccctatagctcagggg

SEQ ID NO: 66041 - DNA, 19 bp, Homo sapiens
  source 1..19: mol_type = genomic DNA
ggccctatagctcaggggt

SEQ ID NO: 66042 - DNA, 19 bp, Homo sapiens
  source 1..19: mol_type = genomic DNA
ggccgcgtggcctaatgga

SEQ ID NO: 66043 - DNA, 16 bp, Homo sapiens
  source 1..16: mol_type = genomic DNA
ggccggttagctcagt

SEQ ID NO: 66044 - DNA, 20 bp, Homo sapiens
  source 1..20: mol_type = genomic DNA
ggccggttagctcagtcggc

SEQ ID NO: 66045 - DNA, 18 bp, Homo sapiens
  source 1..18: mol_type = genomic DNA
ggccggttagctcagttg

SEQ ID NO: 66046 - DNA, 19 bp, Homo sapiens
  source 1..19: mol_type = genomic DNA
ggccggttagctcagttgg

SEQ ID NO: 66047 - DNA, 20 bp, Homo sapiens
  source 1..20: mol_type = genomic DNA
ggccggttagctcagttggt

SEQ ID NO: 66048 - DNA, 21 bp, Homo sapiens
  source 1..21: mol_type = genomic DNA
ggccggttagctcagttggtt

SEQ ID NO: 66049 - DNA, 19 bp, Homo sapiens
  source 1..19: mol_type = genomic DNA
ggccgtgatcgtatagtgg

SEQ ID NO: 66050 - DNA, 20 bp, Homo sapiens
  source 1..20: mol_type = genomic DNA
ggccgtgatcgtatagtggt

SEQ ID NO: 66051 - DNA, 21 bp, Homo sapiens
  source 1..21: mol_type = genomic DNA
ggccgtgatcgtatagtggtt

SEQ ID NO: 66052 - DNA, 22 bp, Homo sapiens
  source 1..22: mol_type = genomic DNA
ggccgtgatcgtatagtggtta

SEQ ID NO: 66053 - DNA, 24 bp, Homo sapiens
  source 1..24: mol_type = genomic DNA
ggccgtgatcgtatagtggttagt

SEQ ID NO: 66054 - DNA, 18 bp, Homo sapiens
  source 1..18: mol_type = genomic DNA
ggcctcgtggcgcaacgg

SEQ ID NO: 66055 - DNA, 18 bp, Homo sapiens
  source 1..18: mol_type = genomic DNA
ggcgcggtggccaagtgg

SEQ ID NO: 66056 - DNA, 17 bp, Homo sapiens
  source 1..17: mol_type = genomic DNA
ggctagctcagtcggta

SEQ ID NO: 66057 - DNA, 19 bp, Homo sapiens
  source 1..19: mol_type = genomic DNA
ggctagctcagtcggtaga

SEQ ID NO: 66058 - DNA, 19 bp, Homo sapiens
  source 1..19: mol_type = genomic DNA
ggctcacatcaccccataa

SEQ ID NO: 66059 - DNA, 25 bp, Homo sapiens
  source 1..25: mol_type = genomic DNA
ggctcacatcaccccataaacacca

SEQ ID NO: 66060 - DNA, 17 bp, Homo sapiens
  source 1..17: mol_type = genomic DNA
ggctccatagctcaggg

SEQ ID NO: 66061 - DNA, 18 bp, Homo sapiens
  source 1..18: mol_type = genomic DNA
ggctccatagctcagggg

SEQ ID NO: 66062 - DNA, 19 bp, Homo sapiens
  source 1..19: mol_type = genomic DNA
ggctccatagctcaggggt

SEQ ID NO: 66063 - DNA, 19 bp, Homo sapiens
  source 1..19: mol_type = genomic DNA
ggctccatagctcagtggt

SEQ ID NO: 66064 - DNA, 18 bp, Homo sapiens
  source 1..18: mol_type = genomic DNA
ggctccgtggcgcaatgg

SEQ ID NO: 66065 - DNA, 19 bp, Homo sapiens
  source 1..19: mol_type = genomic DNA
ggctccgtggcgcaatgga

SEQ ID NO: 66066 - DNA, 18 bp, Homo sapiens
  source 1..18: mol_type = genomic DNA
ggctcgttggtctagggg

SEQ ID NO: 66067 - DNA, 20 bp, Homo sapiens
  source 1..20: mol_type = genomic DNA
ggctcgttggtctaggggta

SEQ ID NO: 66068 - DNA, 18 bp, Homo sapiens
  source 1..18: mol_type = genomic DNA
ggctctgtggcgcaatgg

SEQ ID NO: 66069 - DNA, 19 bp, Homo sapiens
  source 1..19: mol_type = genomic DNA
ggctctgtggcgcaatgga

SEQ ID NO: 66070 - DNA, 20 bp, Homo sapiens
  source 1..20: mol_type = genomic DNA
ggctctgtggcttagttggc

SEQ ID NO: 66071 - DNA, 20 bp, Homo sapiens
  source 1..20: mol_type = genomic DNA
ggctgagtgaagcattggac

SEQ ID NO: 66072 - DNA, 20 bp, Homo sapiens
  source 1..20: mol_type = genomic DNA
gggattgtgggttcgagtcc

SEQ ID NO: 66073 - DNA, 21 bp, Homo sapiens
  source 1..21: mol_type = genomic DNA
gggattgtgggttcgagtccc

SEQ ID NO: 66074 - DNA, 18 bp, Homo sapiens
  source 1..18: mol_type = genomic DNA
gggccagtggcgcaatgg

SEQ ID NO: 66075 - DNA, 19 bp, Homo sapiens
  source 1..19: mol_type = genomic DNA
gggccagtggcgcaatgga

SEQ ID NO: 66076 - DNA, 20 bp, Homo sapiens
  source 1..20: mol_type = genomic DNA
gggccagtggcgcaatggat

SEQ ID NO: 66077 - DNA, 19 bp, Homo sapiens
  source 1..19: mol_type = genomic DNA
gggccagtggctcaatgga

SEQ ID NO: 66078 - DNA, 16 bp, Homo sapiens
  source 1..16: mol_type = genomic DNA
ggggaattagctcaaa

SEQ ID NO: 66079 - DNA, 19 bp, Homo sapiens
  source 1..19: mol_type = genomic DNA
ggggaattagctcaaatgg

SEQ ID NO: 66080 - DNA, 20 bp, Homo sapiens
  source 1..20: mol_type = genomic DNA
ggggaattagctcaaatggt

SEQ ID NO: 66081 - DNA, 21 bp, Homo sapiens
  source 1..21: mol_type = genomic DNA
ggggaattagctcaaatggta

SEQ ID NO: 66082 - DNA, 16 bp, Homo sapiens
  source 1..16: mol_type = genomic DNA
ggggatgtagctcagt

SEQ ID NO: 66083 - DNA, 17 bp, Homo sapiens
  source 1..17: mol_type = genomic DNA
ggggatgtagctcagtg

SEQ ID NO: 66084 - DNA, 18 bp, Homo sapiens
  source 1..18: mol_type = genomic DNA
ggggatgtagctcagtgg

SEQ ID NO: 66085 - DNA, 19 bp, Homo sapiens
  source 1..19: mol_type = genomic DNA
ggggatgtagctcagtggt

SEQ ID NO: 66086 - DNA, 20 bp, Homo sapiens
  source 1..20: mol_type = genomic DNA
ggggatgtagctcagtggta

SEQ ID NO: 66087 - DNA, 21 bp, Homo sapiens
  source 1..21: mol_type = genomic DNA
ggggatgtagctcagtggtag

SEQ ID NO: 66088 - DNA, 22 bp, Homo sapiens
  source 1..22: mol_type = genomic DNA
ggggatgtagctcagtggtaga

SEQ ID NO: 66089 - DNA, 23 bp, Homo sapiens
  source 1..23: mol_type = genomic DNA
ggggatgtagctcagtggtagag

SEQ ID NO: 66090 - DNA, 24 bp, Homo sapiens
  source 1..24: mol_type = genomic DNA
ggggatgtagctcagtggtagagc

SEQ ID NO: 66091 - DNA, 16 bp, Homo sapiens
  source 1..16: mol_type = genomic DNA
ggggattgtgggttcg

SEQ ID NO: 66092 - DNA, 22 bp, Homo sapiens
  source 1..22: mol_type = genomic DNA
ggggattgtgggttcgagtccc

SEQ ID NO: 66093 - DNA, 16 bp, Homo sapiens
  source 1..16: mol_type = genomic DNA
gggggattagctcaaa

SEQ ID NO: 66094 - DNA, 19 bp, Homo sapiens
  source 1..19: mol_type = genomic DNA
gggggattagctcaaatgg

SEQ ID NO: 66095 - DNA, 20 bp, Homo sapiens
  source 1..20: mol_type = genomic DNA
gggggattagctcaaatggt

SEQ ID NO: 66096 - DNA, 21 bp, Homo sapiens
  source 1..21: mol_type = genomic DNA
gggggattagctcaaatggta

SEQ ID NO: 66097 - DNA, 16 bp, Homo sapiens
  source 1..16: mol_type = genomic DNA
gggggtatagctcagt

SEQ ID NO: 66098 - DNA, 18 bp, Homo sapiens
  source 1..18: mol_type = genomic DNA
gggggtatagctcagtgg

SEQ ID NO: 66099 - DNA, 19 bp, Homo sapiens
  source 1..19: mol_type = genomic DNA
gggggtatagctcagtggg

SEQ ID NO: 66100 - DNA, 19 bp, Homo sapiens
  source 1..19: mol_type = genomic DNA
gggggtatagctcagtggt

SEQ ID NO: 66101 - DNA, 16 bp, Homo sapiens
  source 1..16: mol_type = genomic DNA
gggggtgtagctcagt

SEQ ID NO: 66102 - DNA, 17 bp, Homo sapiens
  source 1..17: mol_type = genomic DNA
gggggtgtagctcagtg

SEQ ID NO: 66103 - DNA, 18 bp, Homo sapiens
  source 1..18: mol_type = genomic DNA
gggggtgtagctcagtgg

SEQ ID NO: 66104 - DNA, 19 bp, Homo sapiens
  source 1..19: mol_type = genomic DNA
gggggtgtagctcagtggt

SEQ ID NO: 66105 - DNA, 20 bp, Homo sapiens
  source 1..20: mol_type = genomic DNA
gggggtgtagctcagtggta

SEQ ID NO: 66106 - DNA, 22 bp, Homo sapiens
  source 1..22: mol_type = genomic DNA
gggggtgtagctcagtggtaga

SEQ ID NO: 66107 - DNA, 16 bp, Homo sapiens
  source 1..16: mol_type = genomic DNA
ggggtatgattctcgc

SEQ ID NO: 66108 - DNA, 17 bp, Homo sapiens
  source 1..17: mol_type = genomic DNA
ggggtatgattctcgct

SEQ ID NO: 66109 - DNA, 16 bp, Homo sapiens
  source 1..16: mol_type = genomic DNA
ggggtatgattctcgg

SEQ ID NO: 66110 - DNA, 17 bp, Homo sapiens
  source 1..17: mol_type = genomic DNA
ggggtatgattctcggt

SEQ ID NO: 66111 - DNA, 21 bp, Homo sapiens
  source 1..21: mol_type = genomic DNA
ggggtatgattctcggtttgg

SEQ ID NO: 66112 - DNA, 17 bp, Homo sapiens
  source 1..17: mol_type = genomic DNA
ggggttcgattccttcc

SEQ ID NO: 66113 - DNA, 18 bp, Homo sapiens
  source 1..18: mol_type = genomic DNA
ggggttcgattccttcct

SEQ ID NO: 66114 - DNA, 20 bp, Homo sapiens
  source 1..20: mol_type = genomic DNA
ggggttttgcagtccttacc

SEQ ID NO: 66115 - DNA, 16 bp, Homo sapiens
  source 1..16: mol_type = genomic DNA
gggtatagctcagtgg

SEQ ID NO: 66116 - DNA, 16 bp, Homo sapiens
  source 1..16: mol_type = genomic DNA
gggtatgattctcgct

SEQ ID NO: 66117 - DNA, 17 bp, Homo sapiens
  source 1..17: mol_type = genomic DNA
gggtatgattctcgctt

SEQ ID NO: 66118 - DNA, 16 bp, Homo sapiens
  source 1..16: mol_type = genomic DNA
gggtatgattctcggt

SEQ ID NO: 66119 - DNA, 20 bp, Homo sapiens
  source 1..20: mol_type = genomic DNA
gggtatgattctcggtttgg

SEQ ID NO: 66120 - DNA, 16 bp, Homo sapiens
  source 1..16: mol_type = genomic DNA
gggtgcgagaggtccc

SEQ ID NO: 66121 - DNA, 18 bp, Homo sapiens
  source 1..18: mol_type = genomic DNA
gggtgcgagaggtcccgg

SEQ ID NO: 66122 - DNA, 17 bp, Homo sapiens
  source 1..17: mol_type = genomic DNA
gggttcgattcccgggc

SEQ ID NO: 66123 - DNA, 20 bp, Homo sapiens
  source 1..20: mol_type = genomic DNA
gggttcgattcccggtcagg

SEQ ID NO: 66124 - DNA, 21 bp, Homo sapiens
  source 1..21: mol_type = genomic DNA
gggttcgattcccggtcaggg

SEQ ID NO: 66125 - DNA, 22 bp, Homo sapiens
  source 1..22: mol_type = genomic DNA
gggttcgattcccggtcaggga

SEQ ID NO: 66126 - DNA, 23 bp, Homo sapiens
  source 1..23: mol_type = genomic DNA
gggttcgattcccggtcagggaa

SEQ ID NO: 66127 - DNA, 24 bp, Homo sapiens
  source 1..24: mol_type = genomic DNA
gggttcgattcccggtcagggaac

SEQ ID NO: 66128 - DNA, 18 bp, Homo sapiens
  source 1..18: mol_type = genomic DNA
gggtttccccgcgcaggt

SEQ ID NO: 66129 - DNA, 20 bp, Homo sapiens
  source 1..20: mol_type = genomic DNA
gggttttgcagtccttacca

SEQ ID NO: 66130 - DNA, 16 bp, Homo sapiens
  source 1..16: mol_type = genomic DNA
ggtaaaatggctgagt

SEQ ID NO: 66131 - DNA, 17 bp, Homo sapiens
  source 1..17: mol_type = genomic DNA
ggtaaaatggctgagtg

SEQ ID NO: 66132 - DNA, 18 bp, Homo sapiens
  source 1..18: mol_type = genomic DNA
ggtaaaatggctgagtga

SEQ ID NO: 66133 - DNA, 19 bp, Homo sapiens
  source 1..19: mol_type = genomic DNA
ggtaaaatggctgagtgaa

SEQ ID NO: 66134 - DNA, 20 bp, Homo sapiens
  source 1..20: mol_type = genomic DNA
ggtaaaatggctgagtgaag

SEQ ID NO: 66135 - DNA, 21 bp, Homo sapiens
  source 1..21: mol_type = genomic DNA
ggtaaaatggctgagtgaagc

SEQ ID NO: 66136 - DNA, 22 bp, Homo sapiens
  source 1..22: mol_type = genomic DNA
ggtaaaatggctgagtgaagca

SEQ ID NO: 66137 - DNA, 24 bp, Homo sapiens
  source 1..24: mol_type = genomic DNA
ggtaaaatggctgagtgaagcatt

SEQ ID NO: 66138 - DNA, 25 bp, Homo sapiens
  source 1..25: mol_type = genomic DNA
ggtaaaatggctgagtgaagcattg

SEQ ID NO: 66139 - DNA, 17 bp, Homo sapiens
  source 1..17: mol_type = genomic DNA
ggtaaatatagtttaac

SEQ ID NO: 66140 - DNA, 18 bp, Homo sapiens
  source 1..18: mol_type = genomic DNA
ggtaaatatagtttaacc

SEQ ID NO: 66141 - DNA, 18 bp, Homo sapiens
  source 1..18: mol_type = genomic DNA
ggtagaattctcgcctgc

SEQ ID NO: 66142 - DNA, 19 bp, Homo sapiens
  source 1..19: mol_type = genomic DNA
ggtagaattctcgcctgcc

SEQ ID NO: 66143 - DNA, 17 bp, Homo sapiens
  source 1..17: mol_type = genomic DNA
ggtagagcatgagactc

SEQ ID NO: 66144 - DNA, 18 bp, Homo sapiens
  source 1..18: mol_type = genomic DNA
ggtagagcatgagactct

SEQ ID NO: 66145 - DNA, 19 bp, Homo sapiens
  source 1..19: mol_type = genomic DNA
ggtagagcatgagactctt

SEQ ID NO: 66146 - DNA, 17 bp, Homo sapiens
  source 1..17: mol_type = genomic DNA
ggtagagcatgggactc

SEQ ID NO: 66147 - DNA, 18 bp, Homo sapiens
  source 1..18: mol_type = genomic DNA
ggtagagcatgggactct

SEQ ID NO: 66148 - DNA, 19 bp, Homo sapiens
  source 1..19: mol_type = genomic DNA
ggtagagcatgggactctt

SEQ ID NO: 66149 - DNA, 16 bp, Homo sapiens
  source 1..16: mol_type = genomic DNA
ggtagcgtggccgagc

SEQ ID NO: 66150 - DNA, 17 bp, Homo sapiens
  source 1..17: mol_type = genomic DNA
ggtagcgtggccgagcg

SEQ ID NO: 66151 - DNA, 18 bp, Homo sapiens
  source 1..18: mol_type = genomic DNA
ggtagcgtggccgagcgg

SEQ ID NO: 66152 - DNA, 19 bp, Homo sapiens
  source 1..19: mol_type = genomic DNA
ggtagcgtggccgagcggt

SEQ ID NO: 66153 - DNA, 20 bp, Homo sapiens
  source 1..20: mol_type = genomic DNA
ggtagcgtggccgagcggtc

SEQ ID NO: 66154 - DNA, 21 bp, Homo sapiens
  source 1..21: mol_type = genomic DNA
ggtagcgtggccgagcggtct

SEQ ID NO: 66155 - DNA, 22 bp, Homo sapiens
  source 1..22: mol_type = genomic DNA
ggtagcgtggccgagcggtcta

SEQ ID NO: 66156 - DNA, 16 bp, Homo sapiens
  source 1..16: mol_type = genomic DNA
ggtagcgtggccgagt

SEQ ID NO: 66157 - DNA, 18 bp, Homo sapiens
  source 1..18: mol_type = genomic DNA
ggtagcgtggccgagtgg

SEQ ID NO: 66158 - DNA, 16 bp, Homo sapiens
  source 1..16: mol_type = genomic DNA
ggtagggtggccgagc

SEQ ID NO: 66159 - DNA, 16 bp, Homo sapiens
  source 1..16: mol_type = genomic DNA
ggtagtgtggccgagc

SEQ ID NO: 66160 - DNA, 19 bp, Homo sapiens
  source 1..19: mol_type = genomic DNA
ggtatgattctcgcttcgg

SEQ ID NO: 66161 - DNA, 19 bp, Homo sapiens
  source 1..19: mol_type = genomic DNA
ggtatgattctcgctttgg

SEQ ID NO: 66162 - DNA, 19 bp, Homo sapiens
  source 1..19: mol_type = genomic DNA
ggtatgattctcggtttgg

SEQ ID NO: 66163 - DNA, 18 bp, Homo sapiens
  source 1..18: mol_type = genomic DNA
ggtcccatggtgtaatgg

SEQ ID NO: 66164 - DNA, 19 bp, Homo sapiens
  source 1..19: mol_type = genomic DNA
ggtcccatggtgtaatggt

SEQ ID NO: 66165 - DNA, 19 bp, Homo sapiens
  source 1..19: mol_type = genomic DNA
ggtcgtgggttcgagcccc

SEQ ID NO: 66166 - DNA, 16 bp, Homo sapiens
  source 1..16: mol_type = genomic DNA
ggtcgtggttgtagtc

SEQ ID NO: 66167 - DNA, 17 bp, Homo sapiens
  source 1..17: mol_type = genomic DNA
ggtcgtggttgtagtcc

SEQ ID NO: 66168 - DNA, 21 bp, Homo sapiens
  source 1..21: mol_type = genomic DNA
ggtcgtggttgtagtccgtgc

SEQ ID NO: 66169 - DNA, 16 bp, Homo sapiens
  source 1..16: mol_type = genomic DNA
ggtggagttaaagact

SEQ ID NO: 66170 - DNA, 17 bp, Homo sapiens
  source 1..17: mol_type = genomic DNA
ggtggagttaaagactt

SEQ ID NO: 66171 - DNA, 18 bp, Homo sapiens
  source 1..18: mol_type = genomic DNA
ggtggagttaaagacttt

SEQ ID NO: 66172 - DNA, 19 bp, Homo sapiens
  source 1..19: mol_type = genomic DNA
ggtggagttaaagactttt

SEQ ID NO: 66173 - DNA, 20 bp, Homo sapiens
  source 1..20: mol_type = genomic DNA
ggtggagttaaagacttttt

SEQ ID NO: 66174 - DNA, 19 bp, Homo sapiens
  source 1..19: mol_type = genomic DNA
ggtggttcagtggtagaat

SEQ ID NO: 66175 - DNA, 21 bp, Homo sapiens
  source 1..21: mol_type = genomic DNA
ggtggttcagtggtagaattc

SEQ ID NO: 66176 - DNA, 22 bp, Homo sapiens
  source 1..22: mol_type = genomic DNA
ggtggttcagtggtagaattct

SEQ ID NO: 66177 - DNA, 23 bp, Homo sapiens
  source 1..23: mol_type = genomic DNA
ggtggttcagtggtagaattctc

SEQ ID NO: 66178 - DNA, 25 bp, Homo sapiens
  source 1..25: mol_type = genomic DNA
ggtggttcagtggtagaattctcgc

SEQ ID NO: 66179 - DNA, 17 bp, Homo sapiens
  source 1..17: mol_type = genomic DNA
ggttagcactctggact

SEQ ID NO: 66180 - DNA, 18 bp, Homo sapiens
  source 1..18: mol_type = genomic DNA
ggttagcactctggactc

SEQ ID NO: 66181 - DNA, 19 bp, Homo sapiens
  source 1..19: mol_type = genomic DNA
ggttagcactctggactct

SEQ ID NO: 66182 - DNA, 20 bp, Homo sapiens
  source 1..20: mol_type = genomic DNA
ggttagcactctggactctg

SEQ ID NO: 66183 - DNA, 20 bp, Homo sapiens
  source 1..20: mol_type = genomic DNA
ggttagcactctggactttg

SEQ ID NO: 66184 - DNA, 20 bp, Homo sapiens
  source 1..20: mol_type = genomic DNA
ggttaggattcctggttttc

SEQ ID NO: 66185 - DNA, 16 bp, Homo sapiens
  source 1..16: mol_type = genomic DNA
ggttaggattcggcgc

SEQ ID NO: 66186 - DNA, 17 bp, Homo sapiens
  source 1..17: mol_type = genomic DNA
ggttaggattcggcgct

SEQ ID NO: 66187 - DNA, 18 bp, Homo sapiens
  source 1..18: mol_type = genomic DNA
ggttaggattcggcgctc

SEQ ID NO: 66188 - DNA, 19 bp, Homo sapiens
  source 1..19: mol_type = genomic DNA
ggttaggattcggcgctct

SEQ ID NO: 66189 - DNA, 20 bp, Homo sapiens
  source 1..20: mol_type = genomic DNA
ggttaggattcggcgctctc

SEQ ID NO: 66190 - DNA, 16 bp, Homo sapiens
  source 1..16: mol_type = genomic DNA
ggttagtactctgcgt

SEQ ID NO: 66191 - DNA, 17 bp, Homo sapiens
  source 1..17: mol_type = genomic DNA
ggttagtactctgcgtt

SEQ ID NO: 66192 - DNA, 18 bp, Homo sapiens
  source 1..18: mol_type = genomic DNA
ggttagtactctgcgttg

SEQ ID NO: 66193 - DNA, 19 bp, Homo sapiens
  source 1..19: mol_type = genomic DNA
ggttagtactctgcgttgt

SEQ ID NO: 66194 - DNA, 16 bp, Homo sapiens
  source 1..16: mol_type = genomic DNA
ggttcaaatcccggac

SEQ ID NO: 66195 - DNA, 17 bp, Homo sapiens
  source 1..17: mol_type = genomic DNA
ggttcaaatcccggacg

SEQ ID NO: 66196 - DNA, 19 bp, Homo sapiens
  source 1..19: mol_type = genomic DNA
ggttcaaatcccggacgag

SEQ ID NO: 66197 - DNA, 20 bp, Homo sapiens
  source 1..20: mol_type = genomic DNA
ggttcaaatcccggacgagc

SEQ ID NO: 66198 - DNA, 23 bp, Homo sapiens
  source 1..23: mol_type = genomic DNA
ggttcaaatcccggacgagcccc

SEQ ID NO: 66199 - DNA, 24 bp, Homo sapiens
  source 1..24: mol_type = genomic DNA
ggttcaaatcccggacgagccccc

SEQ ID NO: 66200 - DNA, 24 bp, Homo sapiens
  source 1..24: mol_type = genomic DNA
ggttcaaatccgggtgccccctcc

SEQ ID NO: 66201 - DNA, 22 bp, Homo sapiens
  source 1..22: mol_type = genomic DNA
ggttcagtggtagaattctcgc

SEQ ID NO: 66202 - DNA, 19 bp, Homo sapiens
  source 1..19: mol_type = genomic DNA
ggttccatagtgtagcggt

SEQ ID NO: 66203 - DNA, 18 bp, Homo sapiens
  source 1..18: mol_type = genomic DNA
ggttccatagtgtagtgg

SEQ ID NO: 66204 - DNA, 19 bp, Homo sapiens
  source 1..19: mol_type = genomic DNA
ggttccatagtgtagtggt

SEQ ID NO: 66205 - DNA, 16 bp, Homo sapiens
  source 1..16: mol_type = genomic DNA
ggttccatggtgtaat

SEQ ID NO: 66206 - DNA, 18 bp, Homo sapiens
  source 1..18: mol_type = genomic DNA
ggttccatggtgtaatgg

SEQ ID NO: 66207 - DNA, 19 bp, Homo sapiens
  source 1..19: mol_type = genomic DNA
ggttccatggtgtaatggt

SEQ ID NO: 66208 - DNA, 22 bp, Homo sapiens
  source 1..22: mol_type = genomic DNA
ggttccgggttcgagtcccggc

SEQ ID NO: 66209 - DNA, 19 bp, Homo sapiens
  source 1..19: mol_type = genomic DNA
ggttcgaaaccgggcggaa

SEQ ID NO: 66210 - DNA, 21 bp, Homo sapiens
  source 1..21: mol_type = genomic DNA
ggttcgaaaccgggcggaaac

SEQ ID NO: 66211 - DNA, 23 bp, Homo sapiens
  source 1..23: mol_type = genomic DNA
ggttcgactcccggtgtgggaac

SEQ ID NO: 66212 - DNA, 20 bp, Homo sapiens
  source 1..20: mol_type = genomic DNA
ggttcgatccccgtacgggc

SEQ ID NO: 66213 - DNA, 23 bp, Homo sapiens
  source 1..23: mol_type = genomic DNA
ggttcgattcccggtcagggaac

SEQ ID NO: 66214 - DNA, 16 bp, Homo sapiens
  source 1..16: mol_type = genomic DNA
ggttgtagtccgtgcg

SEQ ID NO: 66215 - DNA, 18 bp, Homo sapiens
  source 1..18: mol_type = genomic DNA
ggttgtagtccgtgcgag

SEQ ID NO: 66216 - DNA, 19 bp, Homo sapiens
  source 1..19: mol_type = genomic DNA
ggttgtagtccgtgcgaga

SEQ ID NO: 66217 - DNA, 20 bp, Homo sapiens
  source 1..20: mol_type = genomic DNA
ggttgtagtccgtgcgagaa

SEQ ID NO: 66218 - DNA, 21 bp, Homo sapiens
  source 1..21: mol_type = genomic DNA
ggttgtagtccgtgcgagaat

SEQ ID NO: 66219 - DNA, 22 bp, Homo sapiens
  source 1..22: mol_type = genomic DNA
ggttgtagtccgtgcgagaata

SEQ ID NO: 66220 - DNA, 24 bp, Homo sapiens
  source 1..24: mol_type = genomic DNA
ggttgtagtccgtgcgagaatacc

SEQ ID NO: 66221 - DNA, 25 bp, Homo sapiens
  source 1..25: mol_type = genomic DNA
ggttgtagtccgtgcgagaatacca

SEQ ID NO: 66222 - DNA, 19 bp, Homo sapiens
  source 1..19: mol_type = genomic DNA
ggttttgcagtccttacca

SEQ ID NO: 66223 - DNA, 20 bp, Homo sapiens
  source 1..20: mol_type = genomic DNA
ggtttttcatatcattggtc

SEQ ID NO: 66224 - DNA, 21 bp, Homo sapiens
  source 1..21: mol_type = genomic DNA
ggtttttcatatcattggtcg

SEQ ID NO: 66225 - DNA, 18 bp, Homo sapiens
  source 1..18: mol_type = genomic DNA
gtaaaccaggggtcgcga

SEQ ID NO: 66226 - DNA, 18 bp, Homo sapiens
  source 1..18: mol_type = genomic DNA
gtaaaccggagatgaaaa

SEQ ID NO: 66227 - DNA, 19 bp, Homo sapiens
  source 1..19: mol_type = genomic DNA
gtaaaccggagatgaaaac

SEQ ID NO: 66228 - DNA, 20 bp, Homo sapiens
  source 1..20: mol_type = genomic DNA
gtaaaccggagatgaaaacc

SEQ ID NO: 66229 - DNA, 21 bp, Homo sapiens
  source 1..21: mol_type = genomic DNA
gtaaaccggagatgaaaacct

SEQ ID NO: 66230 - DNA, 18 bp, Homo sapiens
  source 1..18: mol_type = genomic DNA
gtaaataataggagctta

SEQ ID NO: 66231 - DNA, 19 bp, Homo sapiens
  source 1..19: mol_type = genomic DNA
gtaaataataggagcttaa

SEQ ID NO: 66232 - DNA, 21 bp, Homo sapiens
  source 1..21: mol_type = genomic DNA
gtaaataataggagcttaaac

SEQ ID NO: 66233 - DNA, 16 bp, Homo sapiens
  source 1..16: mol_type = genomic DNA
gtaaggtcagctaaat

SEQ ID NO: 66234 - DNA, 17 bp, Homo sapiens
  source 1..17: mol_type = genomic DNA
gtaaggtcagctaaata

SEQ ID NO: 66235 - DNA, 20 bp, Homo sapiens
  source 1..20: mol_type = genomic DNA
gtaaggtcagctaaataagc

SEQ ID NO: 66236 - DNA, 19 bp, Homo sapiens
  source 1..19: mol_type = genomic DNA
gtaatggttagcactctgg

SEQ ID NO: 66237 - DNA, 20 bp, Homo sapiens
  source 1..20: mol_type = genomic DNA
gtaatggttagcactctgga

SEQ ID NO: 66238 - DNA, 17 bp, Homo sapiens
  source 1..17: mol_type = genomic DNA
gtagaattctcgcctgc

SEQ ID NO: 66239 - DNA, 18 bp, Homo sapiens
  source 1..18: mol_type = genomic DNA
gtagaattctcgcctgcc

SEQ ID NO: 66240 - DNA, 19 bp, Homo sapiens
  source 1..19: mol_type = genomic DNA
gtagaattctcgcctgcca

SEQ ID NO: 66241 - DNA, 16 bp, Homo sapiens
  source 1..16: mol_type = genomic DNA
gtagagcatgagactc

SEQ ID NO: 66242 - DNA, 18 bp, Homo sapiens
  source 1..18: mol_type = genomic DNA
gtagagcatgagactctt

SEQ ID NO: 66243 - DNA, 17 bp, Homo sapiens
  source 1..17: mol_type = genomic DNA
gtagagcatgggactct

SEQ ID NO: 66244 - DNA, 18 bp, Homo sapiens
  source 1..18: mol_type = genomic DNA
gtagagcatgggactctt

SEQ ID NO: 66245 - DNA, 17 bp, Homo sapiens
  source 1..17: mol_type = genomic DNA
gtagtccgtgcgagaat

SEQ ID NO: 66246 - DNA, 18 bp, Homo sapiens
  source 1..18: mol_type = genomic DNA
gtagtccgtgcgagaata

SEQ ID NO: 66247 - DNA, 19 bp, Homo sapiens
  source 1..19: mol_type = genomic DNA
gtagtccgtgcgagaatac

SEQ ID NO: 66248 - DNA, 20 bp, Homo sapiens
  source 1..20: mol_type = genomic DNA
gtagtccgtgcgagaatacc

SEQ ID NO: 66249 - DNA, 21 bp, Homo sapiens
  source 1..21: mol_type = genomic DNA
gtagtccgtgcgagaatacca

SEQ ID NO: 66250 - DNA, 16 bp, Homo sapiens
  source 1..16: mol_type = genomic DNA
gtagtcgtggccgagt

SEQ ID NO: 66251 - DNA, 17 bp, Homo sapiens
  source 1..17: mol_type = genomic DNA
gtagtcgtggccgagtg

SEQ ID NO: 66252 - DNA, 18 bp, Homo sapiens
  source 1..18: mol_type = genomic DNA
gtagtcgtggccgagtgg

SEQ ID NO: 66253 - DNA, 19 bp, Homo sapiens
  source 1..19: mol_type = genomic DNA
gtagtcgtggccgagtggt

SEQ ID NO: 66254 - DNA, 20 bp, Homo sapiens
  source 1..20: mol_type = genomic DNA
gtagtcgtggccgagtggtt

SEQ ID NO: 66255 - DNA, 21 bp, Homo sapiens
  source 1..21: mol_type = genomic DNA
gtagtcgtggccgagtggtta

SEQ ID NO: 66256 - DNA, 22 bp, Homo sapiens
  source 1..22: mol_type = genomic DNA
gtagtcgtggccgagtggttaa

SEQ ID NO: 66257 - DNA, 23 bp, Homo sapiens
  source 1..23: mol_type = genomic DNA
gtagtcgtggccgagtggttaag

SEQ ID NO: 66258 - DNA, 24 bp, Homo sapiens
  source 1..24: mol_type = genomic DNA
gtagtcgtggccgagtggttaagg

SEQ ID NO: 66259 - DNA, 25 bp, Homo sapiens
  source 1..25: mol_type = genomic DNA
gtagtcgtggccgagtggttaaggc

SEQ ID NO: 66260 - DNA, 19 bp, Homo sapiens
  source 1..19: mol_type = genomic DNA
gtatagtggttagtactct

SEQ ID NO: 66261 - DNA, 21 bp, Homo sapiens
  source 1..21: mol_type = genomic DNA
gtatagtggttagtactctgc

SEQ ID NO: 66262 - DNA, 18 bp, Homo sapiens
  source 1..18: mol_type = genomic DNA
gtatgattctcggtttgg

SEQ ID NO: 66263 - DNA, 18 bp, Homo sapiens
  source 1..18: mol_type = genomic DNA
gtcacggtggccgagtgg

SEQ ID NO: 66264 - DNA, 17 bp, Homo sapiens
  source 1..17: mol_type = genomic DNA
gtcacgtcggggtcacc

SEQ ID NO: 66265 - DNA, 18 bp, Homo sapiens
  source 1..18: mol_type = genomic DNA
gtcacgtcggggtcacca

SEQ ID NO: 66266 - DNA, 17 bp, Homo sapiens
  source 1..17: mol_type = genomic DNA
gtcagaggttcaattcc

SEQ ID NO: 66267 - DNA, 19 bp, Homo sapiens
  source 1..19: mol_type = genomic DNA
gtcagaggttcaattcctc

SEQ ID NO: 66268 - DNA, 20 bp, Homo sapiens
  source 1..20: mol_type = genomic DNA
gtcagaggttcaattcctct

SEQ ID NO: 66269 - DNA, 16 bp, Homo sapiens
  source 1..16: mol_type = genomic DNA
gtcaggatggccgagc

SEQ ID NO: 66270 - DNA, 18 bp, Homo sapiens
  source 1..18: mol_type = genomic DNA
gtcaggatggccgagcgg

SEQ ID NO: 66271 - DNA, 19 bp, Homo sapiens
  source 1..19: mol_type = genomic DNA
gtcaggatggccgagcggt

SEQ ID NO: 66272 - DNA, 20 bp, Homo sapiens
  source 1..20: mol_type = genomic DNA
gtcaggatggccgagcggtc

SEQ ID NO: 66273 - DNA, 21 bp, Homo sapiens
  source 1..21: mol_type = genomic DNA
gtcaggatggccgagcggtct

SEQ ID NO: 66274 - DNA, 22 bp, Homo sapiens
  source 1..22: mol_type = genomic DNA
gtcaggatggccgagcggtcta

SEQ ID NO: 66275 - DNA, 25 bp, Homo sapiens
  source 1..25: mol_type = genomic DNA
gtcaggatggccgagcggtctaagg

SEQ ID NO: 66276 - DNA, 18 bp, Homo sapiens
  source 1..18: mol_type = genomic DNA
gtcaggatggccgagtgg

SEQ ID NO: 66277 - DNA, 21 bp, Homo sapiens
  source 1..21: mol_type = genomic DNA
gtcaggatggccgagtggtct

SEQ ID NO: 66278 - DNA, 22 bp, Homo sapiens
  source 1..22: mol_type = genomic DNA
gtcaggatggccgagtggtcta

SEQ ID NO: 66279 - DNA, 25 bp, Homo sapiens
  source 1..25: mol_type = genomic DNA
gtcaggatggccgagtggtctaagg

SEQ ID NO: 66280 - DNA, 18 bp, Homo sapiens
  source 1..18: mol_type = genomic DNA
gtcccatctggggtgcca

SEQ ID NO: 66281 - DNA, 18 bp, Homo sapiens
  source 1..18: mol_type = genomic DNA
gtcccatctgggtcgcca

SEQ ID NO: 66282 - DNA, 17 bp, Homo sapiens
  source 1..17: mol_type = genomic DNA
gtcccattggtctagcc

SEQ ID NO: 66283 - DNA, 18 bp, Homo sapiens
  source 1..18: mol_type = genomic DNA
gtcccattggtctagcca

SEQ ID NO: 66284 - DNA, 21 bp, Homo sapiens
  source 1..21: mol_type = genomic DNA
gtccccggttcaaatccgggt

SEQ ID NO: 66285 - DNA, 18 bp, Homo sapiens
  source 1..18: mol_type = genomic DNA
gtcccggcagagatgcca

SEQ ID NO: 66286 - DNA, 18 bp, Homo sapiens
  source 1..18: mol_type = genomic DNA
gtcccggcggagtcgcca

SEQ ID NO: 66287 - DNA, 16 bp, Homo sapiens
  source 1..16: mol_type = genomic DNA
gtcccgggttcaaatc

SEQ ID NO: 66288 - DNA, 17 bp, Homo sapiens
  source 1..17: mol_type = genomic DNA
gtcccgggttcaaatcc

SEQ ID NO: 66289 - DNA, 18 bp, Homo sapiens
  source 1..18: mol_type = genomic DNA
gtcccgggttcaaatccc

SEQ ID NO: 66290 - DNA, 20 bp, Homo sapiens
  source 1..20: mol_type = genomic DNA
gtcccgggttcaaatcccgg

SEQ ID NO: 66291 - DNA, 21 bp, Homo sapiens
  source 1..21: mol_type = genomic DNA
gtcccgggttcaaatcccgga

SEQ ID NO: 66292 - DNA, 16 bp, Homo sapiens
  source 1..16: mol_type = genomic DNA
gtccctgttcgggcgc

SEQ ID NO: 66293 - DNA, 17 bp, Homo sapiens
  source 1..17: mol_type = genomic DNA
gtccctgttcgggcgcc

SEQ ID NO: 66294 - DNA, 18 bp, Homo sapiens
  source 1..18: mol_type = genomic DNA
gtccctgttcgggcgcca

SEQ ID NO: 66295 - DNA, 17 bp, Homo sapiens
  source 1..17: mol_type = genomic DNA
gtccgtgcgagaatacc

SEQ ID NO: 66296 - DNA, 18 bp, Homo sapiens
  source 1..18: mol_type = genomic DNA
gtccgtgcgagaatacca

SEQ ID NO: 66297 - DNA, 17 bp, Homo sapiens
  source 1..17: mol_type = genomic DNA
gtcctgccgcggtcgcc

SEQ ID NO: 66298 - DNA, 18 bp, Homo sapiens
  source 1..18: mol_type = genomic DNA
gtcctgccgcggtcgcca

SEQ ID NO: 66299 - DNA, 17 bp, Homo sapiens
  source 1..17: mol_type = genomic DNA
gtccttgtagtataaac

SEQ ID NO: 66300 - DNA, 18 bp, Homo sapiens
  source 1..18: mol_type = genomic DNA
gtccttgtagtataaact

SEQ ID NO: 66301 - DNA, 19 bp, Homo sapiens
  source 1..19: mol_type = genomic DNA
gtccttgtagtataaacta

SEQ ID NO: 66302 - DNA, 17 bp, Homo sapiens
  source 1..17: mol_type = genomic DNA
gtcggtagagcatcaga

SEQ ID NO: 66303 - DNA, 18 bp, Homo sapiens
  source 1..18: mol_type = genomic DNA
gtcggtagagcatcagac

SEQ ID NO: 66304 - DNA, 16 bp, Homo sapiens
  source 1..16: mol_type = genomic DNA
gtcggtagagcatgag

SEQ ID NO: 66305 - DNA, 17 bp, Homo sapiens
  source 1..17: mol_type = genomic DNA
gtcggtagagcatgaga

SEQ ID NO: 66306 - DNA, 18 bp, Homo sapiens
  source 1..18: mol_type = genomic DNA
gtcggtagagcatgagac

SEQ ID NO: 66307 - DNA, 19 bp, Homo sapiens
  source 1..19: mol_type = genomic DNA
gtcggtagagcatgagact

SEQ ID NO: 66308 - DNA, 20 bp, Homo sapiens
  source 1..20: mol_type = genomic DNA
gtcggtagagcatgagactc

SEQ ID NO: 66309 - DNA, 21 bp, Homo sapiens
  source 1..21: mol_type = genomic DNA
gtcggtagagcatgagactct

SEQ ID NO: 66310 - DNA, 22 bp, Homo sapiens
  source 1..22: mol_type = genomic DNA
gtcggtagagcatgagactctt

SEQ ID NO: 66311 - DNA, 17 bp, Homo sapiens
  source 1..17: mol_type = genomic DNA
gtcggtagagcatggga

SEQ ID NO: 66312 - DNA, 18 bp, Homo sapiens
  source 1..18: mol_type = genomic DNA
gtcggtagagcatgggac

SEQ ID NO: 66313 - DNA, 19 bp, Homo sapiens
  source 1..19: mol_type = genomic DNA
gtcggtagagcatgggact

SEQ ID NO: 66314 - DNA, 20 bp, Homo sapiens
  source 1..20: mol_type = genomic DNA
gtcggtagagcatgggactc

SEQ ID NO: 66315 - DNA, 21 bp, Homo sapiens
  source 1..21: mol_type = genomic DNA
gtcggtagagcatgggactct

SEQ ID NO: 66316 - DNA, 17 bp, Homo sapiens
  source 1..17: mol_type = genomic DNA
gtcgtgggttcgagccc

SEQ ID NO: 66317 - DNA, 18 bp, Homo sapiens
  source 1..18: mol_type = genomic DNA
gtcgtgggttcgagcccc

SEQ ID NO: 66318 - DNA, 16 bp, Homo sapiens
  source 1..16: mol_type = genomic DNA
gtctaacaacatggct

SEQ ID NO: 66319 - DNA, 24 bp, Homo sapiens
  source 1..24: mol_type = genomic DNA
gtctaacaacatggctttctcacc

SEQ ID NO: 66320 - DNA, 25 bp, Homo sapiens
  source 1..25: mol_type = genomic DNA
gtctaacaacatggctttctcacca

SEQ ID NO: 66321 - DNA, 21 bp, Homo sapiens
  source 1..21: mol_type = genomic DNA
gtctagtggttaggattcggc

SEQ ID NO: 66322 - DNA, 17 bp, Homo sapiens
  source 1..17: mol_type = genomic DNA
gtctcggtggaacctcc

SEQ ID NO: 66323 - DNA, 18 bp, Homo sapiens
  source 1..18: mol_type = genomic DNA
gtctcggtggaacctcca

SEQ ID NO: 66324 - DNA, 16 bp, Homo sapiens
  source 1..16: mol_type = genomic DNA
gtctctgtggcgcaat

SEQ ID NO: 66325 - DNA, 17 bp, Homo sapiens
  source 1..17: mol_type = genomic DNA
gtctctgtggcgcaatc

SEQ ID NO: 66326 - DNA, 18 bp, Homo sapiens
  source 1..18: mol_type = genomic DNA
gtctctgtggcgcaatcg

SEQ ID NO: 66327 - DNA, 19 bp, Homo sapiens
  source 1..19: mol_type = genomic DNA
gtctctgtggcgcaatcgg

SEQ ID NO: 66328 - DNA, 20 bp, Homo sapiens
  source 1..20: mol_type = genomic DNA
gtctctgtggcgcaatcggc

SEQ ID NO: 66329 - DNA, 20 bp, Homo sapiens
  source 1..20: mol_type = genomic DNA
gtctctgtggcgcaatcggt

SEQ ID NO: 66330 - DNA, 18 bp, Homo sapiens
  source 1..18: mol_type = genomic DNA
gtctctgtggcgcaatgg

SEQ ID NO: 66331 - DNA, 19 bp, Homo sapiens
  source 1..19: mol_type = genomic DNA
gtctctgtggcgcaatgga

SEQ ID NO: 66332 - DNA, 20 bp, Homo sapiens
  source 1..20: mol_type = genomic DNA
gtctctgtggcgcaatggac

SEQ ID NO: 66333 - DNA, 21 bp, Homo sapiens
  source 1..21: mol_type = genomic DNA
gtctctgtggcgcaatggacg

SEQ ID NO: 66334 - DNA, 19 bp, Homo sapiens
  source 1..19: mol_type = genomic DNA
gtctctgtggcgcaatggg

SEQ ID NO: 66335 - DNA, 18 bp, Homo sapiens
  source 1..18: mol_type = genomic DNA
gtctcttcgggggcgtgg

SEQ ID NO: 66336 - DNA, 16 bp, Homo sapiens
  source 1..16: mol_type = genomic DNA
gtgaagcattggactg

SEQ ID NO: 66337 - DNA, 17 bp, Homo sapiens
  source 1..17: mol_type = genomic DNA
gtgaagcattggactgt

SEQ ID NO: 66338 - DNA, 18 bp, Homo sapiens
  source 1..18: mol_type = genomic DNA
gtgaagcattggactgta

SEQ ID NO: 66339 - DNA, 16 bp, Homo sapiens
  source 1..16: mol_type = genomic DNA
gtgaatctgacaacag

SEQ ID NO: 66340 - DNA, 18 bp, Homo sapiens
  source 1..18: mol_type = genomic DNA
gtgaatctgacaacagag

SEQ ID NO: 66341 - DNA, 19 bp, Homo sapiens
  source 1..19: mol_type = genomic DNA
gtgaatctgacaacagagg

SEQ ID NO: 66342 - DNA, 20 bp, Homo sapiens
  source 1..20: mol_type = genomic DNA
gtgaatctgacaacagaggc

SEQ ID NO: 66343 - DNA, 21 bp, Homo sapiens
  source 1..21: mol_type = genomic DNA
gtgaatctgacaacagaggct

SEQ ID NO: 66344 - DNA, 22 bp, Homo sapiens
  source 1..22: mol_type = genomic DNA
gtgaatctgacaacagaggctt

SEQ ID NO: 66345 - DNA, 19 bp, Homo sapiens
  source 1..19: mol_type = genomic DNA
gtgatcgtatagtggttag

SEQ ID NO: 66346 - DNA, 20 bp, Homo sapiens
  source 1..20: mol_type = genomic DNA
gtgatcgtatagtggttagt

SEQ ID NO: 66347 - DNA, 23 bp, Homo sapiens
  source 1..23: mol_type = genomic DNA
gtgatcgtatagtggttagtact

SEQ ID NO: 66348 - DNA, 24 bp, Homo sapiens
  source 1..24: mol_type = genomic DNA
gtgatcgtatagtggttagtactc

SEQ ID NO: 66349 - DNA, 25 bp, Homo sapiens
  source 1..25: mol_type = genomic DNA
gtgatcgtatagtggttagtactct

SEQ ID NO: 66350 - DNA, 17 bp, Homo sapiens
  source 1..17: mol_type = genomic DNA
gtgcaactccaaataaa

SEQ ID NO: 66351 - DNA, 21 bp, Homo sapiens
  source 1..21: mol_type = genomic DNA
gtgcaactccaaataaaagta

SEQ ID NO: 66352 - DNA, 22 bp, Homo sapiens
  source 1..22: mol_type = genomic DNA
gtgcaactccaaataaaagtac

SEQ ID NO: 66353 - DNA, 23 bp, Homo sapiens
  source 1..23: mol_type = genomic DNA
gtgcaactccaaataaaagtacc

SEQ ID NO: 66354 - DNA, 24 bp, Homo sapiens
  source 1..24: mol_type = genomic DNA
gtgcaactccaaataaaagtacca

SEQ ID NO: 66355 - DNA, 21 bp, Homo sapiens
  source 1..21: mol_type = genomic DNA
gtgctgggcccataacccaga

SEQ ID NO: 66356 - DNA, 16 bp, Homo sapiens
  source 1..16: mol_type = genomic DNA
gtggagttaaagactt

SEQ ID NO: 66357 - DNA, 17 bp, Homo sapiens
  source 1..17: mol_type = genomic DNA
gtggagttaaagacttt

SEQ ID NO: 66358 - DNA, 18 bp, Homo sapiens
  source 1..18: mol_type = genomic DNA
gtggagttaaagactttt

SEQ ID NO: 66359 - DNA, 19 bp, Homo sapiens
  source 1..19: mol_type = genomic DNA
gtggagttaaagacttttt

SEQ ID NO: 66360 - DNA, 20 bp, Homo sapiens
  source 1..20: mol_type = genomic DNA
gtggagttaaagactttttc

SEQ ID NO: 66361 - DNA, 22 bp, Homo sapiens
  source 1..22: mol_type = genomic DNA
gtggagttaaagactttttctc

SEQ ID NO: 66362 - DNA, 18 bp, Homo sapiens
  source 1..18: mol_type = genomic DNA
gtggcacggagaattttg

SEQ ID NO: 66363 - DNA, 17 bp, Homo sapiens
  source 1..17: mol_type = genomic DNA
gtggccgagtggttaag

SEQ ID NO: 66364 - DNA, 23 bp, Homo sapiens
  source 1..23: mol_type = genomic DNA
gtggggttttgcagtccttacca

SEQ ID NO: 66365 - DNA, 16 bp, Homo sapiens
  source 1..16: mol_type = genomic DNA
gtggtagaattctcgc

SEQ ID NO: 66366 - DNA, 17 bp, Homo sapiens
  source 1..17: mol_type = genomic DNA
gtggtagaattctcgcc

SEQ ID NO: 66367 - DNA, 18 bp, Homo sapiens
  source 1..18: mol_type = genomic DNA
gtggtagaattctcgcct

SEQ ID NO: 66368 - DNA, 19 bp, Homo sapiens
  source 1..19: mol_type = genomic DNA
gtggtagaattctcgcctg

SEQ ID NO: 66369 - DNA, 20 bp, Homo sapiens
  source 1..20: mol_type = genomic DNA
gtggtagaattctcgcctgc

SEQ ID NO: 66370 - DNA, 21 bp, Homo sapiens
  source 1..21: mol_type = genomic DNA
gtggtagaattctcgcctgcc

SEQ ID NO: 66371 - DNA, 20 bp, Homo sapiens
  source 1..20: mol_type = genomic DNA
gtggtagagcatttgactgc

SEQ ID NO: 66372 - DNA, 18 bp, Homo sapiens
  source 1..18: mol_type = genomic DNA
gtggtatcatgcaagatt

SEQ ID NO: 66373 - DNA, 21 bp, Homo sapiens
  source 1..21: mol_type = genomic DNA
gtggtctagtggttaggattc

SEQ ID NO: 66374 - DNA, 24 bp, Homo sapiens
  source 1..24: mol_type = genomic DNA
gtggtctagtggttaggattcggc

SEQ ID NO: 66375 - DNA, 16 bp, Homo sapiens
  source 1..16: mol_type = genomic DNA
gtggttaggattcggc

SEQ ID NO: 66376 - DNA, 17 bp, Homo sapiens
  source 1..17: mol_type = genomic DNA
gtggttaggattcggcg

SEQ ID NO: 66377 - DNA, 18 bp, Homo sapiens
  source 1..18: mol_type = genomic DNA
gtggttaggattcggcgc

SEQ ID NO: 66378 - DNA, 19 bp, Homo sapiens
  source 1..19: mol_type = genomic DNA
gtggttaggattcggcgct

SEQ ID NO: 66379 - DNA, 20 bp, Homo sapiens
  source 1..20: mol_type = genomic DNA
gtggttaggattcggcgctc

SEQ ID NO: 66380 - DNA, 21 bp, Homo sapiens
  source 1..21: mol_type = genomic DNA
gtggttaggattcggcgctct

SEQ ID NO: 66381 - DNA, 22 bp, Homo sapiens
  source 1..22: mol_type = genomic DNA
gtggttaggattcggcgctctc

SEQ ID NO: 66382 - DNA, 16 bp, Homo sapiens
  source 1..16: mol_type = genomic DNA
gtggttagtactctgc

SEQ ID NO: 66383 - DNA, 17 bp, Homo sapiens
  source 1..17: mol_type = genomic DNA
gtggttagtactctgcg

SEQ ID NO: 66384 - DNA, 18 bp, Homo sapiens
  source 1..18: mol_type = genomic DNA
gtggttagtactctgcgt

SEQ ID NO: 66385 - DNA, 19 bp, Homo sapiens
  source 1..19: mol_type = genomic DNA
gtggttagtactctgcgtt

SEQ ID NO: 66386 - DNA, 20 bp, Homo sapiens
  source 1..20: mol_type = genomic DNA
gtggttagtactctgcgttg

SEQ ID NO: 66387 - DNA, 20 bp, Homo sapiens
  source 1..20: mol_type = genomic DNA
gtggttcagtggtagaattc

SEQ ID NO: 66388 - DNA, 21 bp, Homo sapiens
  source 1..21: mol_type = genomic DNA
gtggttcagtggtagaattct

SEQ ID NO: 66389 - DNA, 22 bp, Homo sapiens
  source 1..22: mol_type = genomic DNA
gtggttcagtggtagaattctc

SEQ ID NO: 66390 - DNA, 24 bp, Homo sapiens
  source 1..24: mol_type = genomic DNA
gtggttcagtggtagaattctcgc

SEQ ID NO: 66391 - DNA, 25 bp, Homo sapiens
  source 1..25: mol_type = genomic DNA
gtggttcagtggtagaattctcgcc

SEQ ID NO: 66392 - DNA, 17 bp, Homo sapiens
  source 1..17: mol_type = genomic DNA
gtggttgtagtccgtgc

SEQ ID NO: 66393 - DNA, 18 bp, Homo sapiens
  source 1..18: mol_type = genomic DNA
gtggttgtagtccgtgcg

SEQ ID NO: 66394 - DNA, 19 bp, Homo sapiens
  source 1..19: mol_type = genomic DNA
gtggttgtagtccgtgcga

SEQ ID NO: 66395 - DNA, 20 bp, Homo sapiens
  source 1..20: mol_type = genomic DNA
gtggttgtagtccgtgcgag

SEQ ID NO: 66396 - DNA, 21 bp, Homo sapiens
  source 1..21: mol_type = genomic DNA
gtggttgtagtccgtgcgaga

SEQ ID NO: 66397 - DNA, 22 bp, Homo sapiens
  source 1..22: mol_type = genomic DNA
gtggttgtagtccgtgcgagaa

SEQ ID NO: 66398 - DNA, 23 bp, Homo sapiens
  source 1..23: mol_type = genomic DNA
gtggttgtagtccgtgcgagaat

SEQ ID NO: 66399 - DNA, 24 bp, Homo sapiens
  source 1..24: mol_type = genomic DNA
gtggttgtagtccgtgcgagaata

SEQ ID NO: 66400 - DNA, 25 bp, Homo sapiens
  source 1..25: mol_type = genomic DNA
gtggttgtagtccgtgcgagaatac

SEQ ID NO: 66401 - DNA, 21 bp, Homo sapiens
  source 1..21: mol_type = genomic DNA
gtgtaatggttagcactctgg

SEQ ID NO: 66402 - DNA, 17 bp, Homo sapiens
  source 1..17: mol_type = genomic DNA
gttaaagactttttctc

SEQ ID NO: 66403 - DNA, 20 bp, Homo sapiens
  source 1..20: mol_type = genomic DNA
gttaaagactttttctctga

SEQ ID NO: 66404 - DNA, 21 bp, Homo sapiens
  source 1..21: mol_type = genomic DNA
gttaaagactttttctctgac

SEQ ID NO: 66405 - DNA, 22 bp, Homo sapiens
  source 1..22: mol_type = genomic DNA
gttaaagactttttctctgacc

SEQ ID NO: 66406 - DNA, 23 bp, Homo sapiens
  source 1..23: mol_type = genomic DNA
gttaaagactttttctctgacca

SEQ ID NO: 66407 - DNA, 16 bp, Homo sapiens
  source 1..16: mol_type = genomic DNA
gttaaagattaagaga

SEQ ID NO: 66408 - DNA, 17 bp, Homo sapiens
  source 1..17: mol_type = genomic DNA
gttaaagattaagagaa

SEQ ID NO: 66409 - DNA, 18 bp, Homo sapiens
  source 1..18: mol_type = genomic DNA
gttaaagattaagagaac

SEQ ID NO: 66410 - DNA, 19 bp, Homo sapiens
  source 1..19: mol_type = genomic DNA
gttaaagattaagagaacc

SEQ ID NO: 66411 - DNA, 20 bp, Homo sapiens
  source 1..20: mol_type = genomic DNA
gttaaagattaagagaacca

SEQ ID NO: 66412 - DNA, 21 bp, Homo sapiens
  source 1..21: mol_type = genomic DNA
gttaaagattaagagaaccaa

SEQ ID NO: 66413 - DNA, 22 bp, Homo sapiens
  source 1..22: mol_type = genomic DNA
gttaaagattaagagaaccaac

SEQ ID NO: 66414 - DNA, 23 bp, Homo sapiens
  source 1..23: mol_type = genomic DNA
gttaaagattaagagaaccaaca

SEQ ID NO: 66415 - DNA, 25 bp, Homo sapiens
  source 1..25: mol_type = genomic DNA
gttaaagattaagagaaccaacacc

SEQ ID NO: 66416 - DNA, 20 bp, Homo sapiens
  source 1..20: mol_type = genomic DNA
gttaaatacagaccaagagc

SEQ ID NO: 66417 - DNA, 17 bp, Homo sapiens
  source 1..17: mol_type = genomic DNA
gttaaattataggctaa

SEQ ID NO: 66418 - DNA, 16 bp, Homo sapiens
  source 1..16: mol_type = genomic DNA
gttaagatggcagagc

SEQ ID NO: 66419 - DNA, 17 bp, Homo sapiens
  source 1..17: mol_type = genomic DNA
gttaagatggcagagcc

SEQ ID NO: 66420 - DNA, 18 bp, Homo sapiens
  source 1..18: mol_type = genomic DNA
gttaagatggcagagccc

SEQ ID NO: 66421 - DNA, 19 bp, Homo sapiens
  source 1..19: mol_type = genomic DNA
gttaagatggcagagccca

SEQ ID NO: 66422 - DNA, 19 bp, Homo sapiens
  source 1..19: mol_type = genomic DNA
gttaagatggcagagcccg

SEQ ID NO: 66423 - DNA, 20 bp, Homo sapiens
  source 1..20: mol_type = genomic DNA
gttaagatggcagagcccgg

SEQ ID NO: 66424 - DNA, 21 bp, Homo sapiens
  source 1..21: mol_type = genomic DNA
gttaagatggcagagcccggc

SEQ ID NO: 66425 - DNA, 21 bp, Homo sapiens
  source 1..21: mol_type = genomic DNA
gttaagatggcagagcccggt

SEQ ID NO: 66426 - DNA, 22 bp, Homo sapiens
  source 1..22: mol_type = genomic DNA
gttaagatggcagagcccggta

SEQ ID NO: 66427 - DNA, 23 bp, Homo sapiens
  source 1..23: mol_type = genomic DNA
gttaagatggcagagcccggtaa

SEQ ID NO: 66428 - DNA, 24 bp, Homo sapiens
  source 1..24: mol_type = genomic DNA
gttaagatggcagagcccggtaat

SEQ ID NO: 66429 - DNA, 25 bp, Homo sapiens
  source 1..25: mol_type = genomic DNA
gttaagatggcagagcccggtaatc

SEQ ID NO: 66430 - DNA, 19 bp, Homo sapiens
  source 1..19: mol_type = genomic DNA
gttagcactctggactctg

SEQ ID NO: 66431 - DNA, 19 bp, Homo sapiens
  source 1..19: mol_type = genomic DNA
gttaggattcctggttttc

SEQ ID NO: 66432 - DNA, 16 bp, Homo sapiens
  source 1..16: mol_type = genomic DNA
gttaggattcggcgct

SEQ ID NO: 66433 - DNA, 17 bp, Homo sapiens
  source 1..17: mol_type = genomic DNA
gttaggattcggcgctc

SEQ ID NO: 66434 - DNA, 18 bp, Homo sapiens
  source 1..18: mol_type = genomic DNA
gttaggattcggcgctct

SEQ ID NO: 66435 - DNA, 19 bp, Homo sapiens
  source 1..19: mol_type = genomic DNA
gttaggattcggcgctctc

SEQ ID NO: 66436 - DNA, 21 bp, Homo sapiens
  source 1..21: mol_type = genomic DNA
gttaggcctctttttaccacc

SEQ ID NO: 66437 - DNA, 22 bp, Homo sapiens
  source 1..22: mol_type = genomic DNA
gttaggcctctttttaccacca

SEQ ID NO: 66438 - DNA, 17 bp, Homo sapiens
  source 1..17: mol_type = genomic DNA
gttagtactctgcgttg

SEQ ID NO: 66439 - DNA, 18 bp, Homo sapiens
  source 1..18: mol_type = genomic DNA
gttagtactctgcgttgt

SEQ ID NO: 66440 - DNA, 21 bp, Homo sapiens
  source 1..21: mol_type = genomic DNA
gttatacccttcccgtactac

SEQ ID NO: 66441 - DNA, 22 bp, Homo sapiens
  source 1..22: mol_type = genomic DNA
gttatacccttcccgtactacc

SEQ ID NO: 66442 - DNA, 23 bp, Homo sapiens
  source 1..23: mol_type = genomic DNA
gttatacccttcccgtactacca

SEQ ID NO: 66443 - DNA, 18 bp, Homo sapiens
  source 1..18: mol_type = genomic DNA
gttcaaatcccggacgag

SEQ ID NO: 66444 - DNA, 19 bp, Homo sapiens
  source 1..19: mol_type = genomic DNA
gttcaaatcccggacgagc

SEQ ID NO: 66445 - DNA, 16 bp, Homo sapiens
  source 1..16: mol_type = genomic DNA
gttcaaatccgggtgc

SEQ ID NO: 66446 - DNA, 18 bp, Homo sapiens
  source 1..18: mol_type = genomic DNA
gttcaaatccgggtgccc

SEQ ID NO: 66447 - DNA, 21 bp, Homo sapiens
  source 1..21: mol_type = genomic DNA
gttcaaatccgggtgccccct

SEQ ID NO: 66448 - DNA, 22 bp, Homo sapiens
  source 1..22: mol_type = genomic DNA
gttcaaatccgggtgccccctc

SEQ ID NO: 66449 - DNA, 23 bp, Homo sapiens
  source 1..23: mol_type = genomic DNA
gttcaaatccgggtgccccctcc

SEQ ID NO: 66450 - DNA, 19 bp, Homo sapiens
  source 1..19: mol_type = genomic DNA
gttcaggtcgcagtctccc

SEQ ID NO: 66451 - DNA, 21 bp, Homo sapiens
  source 1..21: mol_type = genomic DNA
gttcagtggtagaattctcgc

SEQ ID NO: 66452 - DNA, 20 bp, Homo sapiens
  source 1..20: mol_type = genomic DNA
gttccgggttcgagtcccgg

SEQ ID NO: 66453 - DNA, 21 bp, Homo sapiens
  source 1..21: mol_type = genomic DNA
gttccgggttcgagtcccggc

SEQ ID NO: 66454 - DNA, 19 bp, Homo sapiens
  source 1..19: mol_type = genomic DNA
gttcgaatccgagtcacgg

SEQ ID NO: 66455 - DNA, 23 bp, Homo sapiens
  source 1..23: mol_type = genomic DNA
gttcgaatccgagtcacggcacc

SEQ ID NO: 66456 - DNA, 22 bp, Homo sapiens
  source 1..22: mol_type = genomic DNA
gttcgactcccggtgtgggaac

SEQ ID NO: 66457 - DNA, 23 bp, Homo sapiens
  source 1..23: mol_type = genomic DNA
gttcgactcccggtgtgggaacc

SEQ ID NO: 66458 - DNA, 24 bp, Homo sapiens
  source 1..24: mol_type = genomic DNA
gttcgactcccggtgtgggaacca

SEQ ID NO: 66459 - DNA, 19 bp, Homo sapiens
  source 1..19: mol_type = genomic DNA
gttcgagccccagtggaac

SEQ ID NO: 66460 - DNA, 24 bp, Homo sapiens
  source 1..24: mol_type = genomic DNA
gttcgatcccgggtttcggcacca

SEQ ID NO: 66461 - DNA, 18 bp, Homo sapiens
  source 1..18: mol_type = genomic DNA
gttcgattcccgggcggc

SEQ ID NO: 66462 - DNA, 23 bp, Homo sapiens
  source 1..23: mol_type = genomic DNA
gttcgattccggctcgaaggacc

SEQ ID NO: 66463 - DNA, 18 bp, Homo sapiens
  source 1..18: mol_type = genomic DNA
gttcgattctcatagtcc

SEQ ID NO: 66464 - DNA, 16 bp, Homo sapiens
  source 1..16: mol_type = genomic DNA
gttcttgtagttgaaa

SEQ ID NO: 66465 - DNA, 17 bp, Homo sapiens
  source 1..17: mol_type = genomic DNA
gttcttgtagttgaaat

SEQ ID NO: 66466 - DNA, 18 bp, Homo sapiens
  source 1..18: mol_type = genomic DNA
gttcttgtagttgaaata

SEQ ID NO: 66467 - DNA, 19 bp, Homo sapiens
  source 1..19: mol_type = genomic DNA
gttcttgtagttgaaatac

SEQ ID NO: 66468 - DNA, 20 bp, Homo sapiens
  source 1..20: mol_type = genomic DNA
gttcttgtagttgaaataca

SEQ ID NO: 66469 - DNA, 21 bp, Homo sapiens
  source 1..21: mol_type = genomic DNA
gttgcaatacttaatttctgc

SEQ ID NO: 66470 - DNA, 22 bp, Homo sapiens
  source 1..22: mol_type = genomic DNA
gttgcaatacttaatttctgcc

SEQ ID NO: 66471 - DNA, 23 bp, Homo sapiens
  source 1..23: mol_type = genomic DNA
gttgcaatacttaatttctgcca

SEQ ID NO: 66472 - DNA, 18 bp, Homo sapiens
  source 1..18: mol_type = genomic DNA
gttgtagtccgtgcgaga

SEQ ID NO: 66473 - DNA, 19 bp, Homo sapiens
  source 1..19: mol_type = genomic DNA
gttgtagtccgtgcgagaa

SEQ ID NO: 66474 - DNA, 20 bp, Homo sapiens
  source 1..20: mol_type = genomic DNA
gttgtagtccgtgcgagaat

SEQ ID NO: 66475 - DNA, 21 bp, Homo sapiens
  source 1..21: mol_type = genomic DNA
gttgtagtccgtgcgagaata

SEQ ID NO: 66476 - DNA, 22 bp, Homo sapiens
  source 1..22: mol_type = genomic DNA
gttgtagtccgtgcgagaatac

SEQ ID NO: 66477 - DNA, 23 bp, Homo sapiens
  source 1..23: mol_type = genomic DNA
gttgtagtccgtgcgagaatacc

SEQ ID NO: 66478 - DNA, 24 bp, Homo sapiens
  source 1..24: mol_type = genomic DNA
gttgtagtccgtgcgagaatacca

SEQ ID NO: 66479 - DNA, 19 bp, Homo sapiens
  source 1..19: mol_type = genomic DNA
gtttaaccaaaacatcaga

SEQ ID NO: 66480 - DNA, 16 bp, Homo sapiens
  source 1..16: mol_type = genomic DNA
gtttagacgggctcac

SEQ ID NO: 66481 - DNA, 17 bp, Homo sapiens
  source 1..17: mol_type = genomic DNA
gtttagacgggctcaca

SEQ ID NO: 66482 - DNA, 18 bp, Homo sapiens
  source 1..18: mol_type = genomic DNA
gtttagacgggctcacat

SEQ ID NO: 66483 - DNA, 19 bp, Homo sapiens
  source 1..19: mol_type = genomic DNA
gtttagacgggctcacatc

SEQ ID NO: 66484 - DNA, 20 bp, Homo sapiens
  source 1..20: mol_type = genomic DNA
gtttagacgggctcacatca

SEQ ID NO: 66485 - DNA, 21 bp, Homo sapiens
  source 1..21: mol_type = genomic DNA
gtttagacgggctcacatcac

SEQ ID NO: 66486 - DNA, 22 bp, Homo sapiens
  source 1..22: mol_type = genomic DNA
gtttagacgggctcacatcacc

SEQ ID NO: 66487 - DNA, 23 bp, Homo sapiens
  source 1..23: mol_type = genomic DNA
gtttagacgggctcacatcaccc

SEQ ID NO: 66488 - DNA, 24 bp, Homo sapiens
  source 1..24: mol_type = genomic DNA
gtttagacgggctcacatcacccc

SEQ ID NO: 66489 - DNA, 25 bp, Homo sapiens
  source 1..25: mol_type = genomic DNA
gtttagacgggctcacatcacccca

SEQ ID NO: 66490 - DNA, 16 bp, Homo sapiens
  source 1..16: mol_type = genomic DNA
gtttatgtagcttacc

SEQ ID NO: 66491 - DNA, 17 bp, Homo sapiens
  source 1..17: mol_type = genomic DNA
gtttatgtagcttacct

SEQ ID NO: 66492 - DNA, 18 bp, Homo sapiens
  source 1..18: mol_type = genomic DNA
gtttatgtagcttacctc

SEQ ID NO: 66493 - DNA, 19 bp, Homo sapiens
  source 1..19: mol_type = genomic DNA
gtttatgtagcttacctcc

SEQ ID NO: 66494 - DNA, 20 bp, Homo sapiens
  source 1..20: mol_type = genomic DNA
gtttatgtagcttacctcct

SEQ ID NO: 66495 - DNA, 21 bp, Homo sapiens
  source 1..21: mol_type = genomic DNA
gtttatgtagcttacctcctc

SEQ ID NO: 66496 - DNA, 22 bp, Homo sapiens
  source 1..22: mol_type = genomic DNA
gtttatgtagcttacctcctca

SEQ ID NO: 66497 - DNA, 24 bp, Homo sapiens
  source 1..24: mol_type = genomic DNA
gtttatgtagcttacctcctcaaa

SEQ ID NO: 66498 - DNA, 16 bp, Homo sapiens
  source 1..16: mol_type = genomic DNA
gtttccccgcgcaggt

SEQ ID NO: 66499 - DNA, 19 bp, Homo sapiens
  source 1..19: mol_type = genomic DNA
gtttccgtagtggagtggt

SEQ ID NO: 66500 - DNA, 16 bp, Homo sapiens
  source 1..16: mol_type = genomic DNA
gtttccgtagtgtagc

SEQ ID NO: 66501 - DNA, 18 bp, Homo sapiens
  source 1..18: mol_type = genomic DNA
gtttccgtagtgtagcgg

SEQ ID NO: 66502 - DNA, 19 bp, Homo sapiens
  source 1..19: mol_type = genomic DNA
gtttccgtagtgtagcggt

SEQ ID NO: 66503 - DNA, 20 bp, Homo sapiens
  source 1..20: mol_type = genomic DNA
gtttccgtagtgtagcggtt

SEQ ID NO: 66504 - DNA, 21 bp, Homo sapiens
  source 1..21: mol_type = genomic DNA
gtttccgtagtgtagcggtta

SEQ ID NO: 66505 - DNA, 22 bp, Homo sapiens
  source 1..22: mol_type = genomic DNA
gtttccgtagtgtagcggttat

SEQ ID NO: 66506 - DNA, 23 bp, Homo sapiens
  source 1..23: mol_type = genomic DNA
gtttccgtagtgtagcggttatc

SEQ ID NO: 66507 - DNA, 16 bp, Homo sapiens
  source 1..16: mol_type = genomic DNA
gtttccgtagtgtagt

SEQ ID NO: 66508 - DNA, 17 bp, Homo sapiens
  source 1..17: mol_type = genomic DNA
gtttccgtagtgtagtg

SEQ ID NO: 66509 - DNA, 18 bp, Homo sapiens
  source 1..18: mol_type = genomic DNA
gtttccgtagtgtagtgg

SEQ ID NO: 66510 - DNA, 19 bp, Homo sapiens
  source 1..19: mol_type = genomic DNA
gtttccgtagtgtagtggt

SEQ ID NO: 66511 - DNA, 20 bp, Homo sapiens
  source 1..20: mol_type = genomic DNA
gtttccgtagtgtagtggtc

SEQ ID NO: 66512 - DNA, 22 bp, Homo sapiens
  source 1..22: mol_type = genomic DNA
gtttccgtagtgtagtggtcat

SEQ ID NO: 66513 - DNA, 23 bp, Homo sapiens
  source 1..23: mol_type = genomic DNA
gtttccgtagtgtagtggtcatc

SEQ ID NO: 66514 - DNA, 20 bp, Homo sapiens
  source 1..20: mol_type = genomic DNA
gtttccgtagtgtagtggtt

SEQ ID NO: 66515 - DNA, 21 bp, Homo sapiens
  source 1..21: mol_type = genomic DNA
gtttccgtagtgtagtggtta

SEQ ID NO: 66516 - DNA, 22 bp, Homo sapiens
  source 1..22: mol_type = genomic DNA
gtttccgtagtgtagtggttat

SEQ ID NO: 66517 - DNA, 23 bp, Homo sapiens
  source 1..23: mol_type = genomic DNA
gtttccgtagtgtagtggttatc

SEQ ID NO: 66518 - DNA, 24 bp, Homo sapiens
  source 1..24: mol_type = genomic DNA
gtttccgtagtgtagtggttatca

SEQ ID NO: 66519 - DNA, 19 bp, Homo sapiens
  source 1..19: mol_type = genomic DNA
gtttccgtggtgtagtggt

SEQ ID NO: 66520 - DNA, 18 bp, Homo sapiens
  source 1..18: mol_type = genomic DNA
gtttgtgggtttaagtcc

SEQ ID NO: 66521 - DNA, 19 bp, Homo sapiens
  source 1..19: mol_type = genomic DNA
gtttgtgggtttaagtccc

SEQ ID NO: 66522 - DNA, 20 bp, Homo sapiens
  source 1..20: mol_type = genomic DNA
gtttgtgggtttaagtccca

SEQ ID NO: 66523 - DNA, 22 bp, Homo sapiens
  source 1..22: mol_type = genomic DNA
gtttgtgggtttaagtcccatt

SEQ ID NO: 66524 - DNA, 18 bp, Homo sapiens
  source 1..18: mol_type = genomic DNA
gttttgcagtccttacca

SEQ ID NO: 66525 - DNA, 17 bp, Homo sapiens
  source 1..17: mol_type = genomic DNA
gtttttcatatcattgg

SEQ ID NO: 66526 - DNA, 18 bp, Homo sapiens
  source 1..18: mol_type = genomic DNA
gtttttcatatcattggt

SEQ ID NO: 66527 - DNA, 19 bp, Homo sapiens
  source 1..19: mol_type = genomic DNA
gtttttcatatcattggtc

SEQ ID NO: 66528 - DNA, 20 bp, Homo sapiens
  source 1..20: mol_type = genomic DNA
gtttttcatatcattggtcg

SEQ ID NO: 66529 - DNA, 21 bp, Homo sapiens
  source 1..21: mol_type = genomic DNA
gtttttcatatcattggtcgt

SEQ ID NO: 66530 - DNA, 19 bp, Homo sapiens
  source 1..19: mol_type = genomic DNA
taaaacttaaaactttaca

SEQ ID NO: 66531 - DNA, 20 bp, Homo sapiens
  source 1..20: mol_type = genomic DNA
taaaacttaaaactttacag

SEQ ID NO: 66532 - DNA, 21 bp, Homo sapiens
  source 1..21: mol_type = genomic DNA
taaacaggagatcctgggttc

SEQ ID NO: 66533 - DNA, 22 bp, Homo sapiens
  source 1..22: mol_type = genomic DNA
taaacaggagatcctgggttcg

SEQ ID NO: 66534 - DNA, 23 bp, Homo sapiens
  source 1..23: mol_type = genomic DNA
taaacaggagatcctgggttcga

SEQ ID NO: 66535 - DNA, 19 bp, Homo sapiens
  source 1..19: mol_type = genomic DNA
taaacccccttatttctac

SEQ ID NO: 66536 - DNA, 20 bp, Homo sapiens
  source 1..20: mol_type = genomic DNA
taaacccccttatttctacc

SEQ ID NO: 66537 - DNA, 21 bp, Homo sapiens
  source 1..21: mol_type = genomic DNA
taaacccccttatttctacca

SEQ ID NO: 66538 - DNA, 23 bp, Homo sapiens
  source 1..23: mol_type = genomic DNA
taaaccgaagatcacgggttcga

SEQ ID NO: 66539 - DNA, 23 bp, Homo sapiens
  source 1..23: mol_type = genomic DNA
taaaccgaagatcgcgggttcga

SEQ ID NO: 66540 - DNA, 18 bp, Homo sapiens
  source 1..18: mol_type = genomic DNA
taaaccggagatgaaaac

SEQ ID NO: 66541 - DNA, 19 bp, Homo sapiens
  source 1..19: mol_type = genomic DNA
taaaccggagatgaaaacc

SEQ ID NO: 66542 - DNA, 20 bp, Homo sapiens
  source 1..20: mol_type = genomic DNA
taaaccggagatgaaaacct

SEQ ID NO: 66543 - DNA, 21 bp, Homo sapiens
  source 1..21: mol_type = genomic DNA
taaaccggagatgaaaacctt

SEQ ID NO: 66544 - DNA, 18 bp, Homo sapiens
  source 1..18: mol_type = genomic DNA
taaagactttttctctga

SEQ ID NO: 66545 - DNA, 19 bp, Homo sapiens
  source 1..19: mol_type = genomic DNA
taaagactttttctctgac

SEQ ID NO: 66546 - DNA, 20 bp, Homo sapiens
  source 1..20: mol_type = genomic DNA
taaagactttttctctgacc

SEQ ID NO: 66547 - DNA, 21 bp, Homo sapiens
  source 1..21: mol_type = genomic DNA
taaagactttttctctgacca

SEQ ID NO: 66548 - DNA, 16 bp, Homo sapiens
  source 1..16: mol_type = genomic DNA
taaagattaagagaac

SEQ ID NO: 66549 - DNA, 17 bp, Homo sapiens
  source 1..17: mol_type = genomic DNA
taaagattaagagaacc

SEQ ID NO: 66550 - DNA, 18 bp, Homo sapiens
  source 1..18: mol_type = genomic DNA
taaagattaagagaacca

SEQ ID NO: 66551 - DNA, 19 bp, Homo sapiens
  source 1..19: mol_type = genomic DNA
taaagattaagagaaccaa

SEQ ID NO: 66552 - DNA, 20 bp, Homo sapiens
  source 1..20: mol_type = genomic DNA
taaagattaagagaaccaac

SEQ ID NO: 66553 - DNA, 21 bp, Homo sapiens
  source 1..21: mol_type = genomic DNA
taaagattaagagaaccaaca

SEQ ID NO: 66554 - DNA, 17 bp, Homo sapiens
  source 1..17: mol_type = genomic DNA
taaagtggctgatttgc

SEQ ID NO: 66555 - DNA, 16 bp, Homo sapiens
  source 1..16: mol_type = genomic DNA
taaataagctatcggg

SEQ ID NO: 66556 - DNA, 17 bp, Homo sapiens
  source 1..17: mol_type = genomic DNA
taaataagctatcgggc

SEQ ID NO: 66557 - DNA, 18 bp, Homo sapiens
  source 1..18: mol_type = genomic DNA
taaataagctatcgggcc

SEQ ID NO: 66558 - DNA, 19 bp, Homo sapiens
  source 1..19: mol_type = genomic DNA
taaataagctatcgggccc

SEQ ID NO: 66559 - DNA, 20 bp, Homo sapiens
  source 1..20: mol_type = genomic DNA
taaataagctatcgggccca

SEQ ID NO: 66560 - DNA, 21 bp, Homo sapiens
  source 1..21: mol_type = genomic DNA
taaataagctatcgggcccat

SEQ ID NO: 66561 - DNA, 18 bp, Homo sapiens
  source 1..18: mol_type = genomic DNA
taaataataggagcttaa

SEQ ID NO: 66562 - DNA, 22 bp, Homo sapiens
  source 1..22: mol_type = genomic DNA
taaataataggagcttaaaccc

SEQ ID NO: 66563 - DNA, 18 bp, Homo sapiens
  source 1..18: mol_type = genomic DNA
taaatacagaccaagagc

SEQ ID NO: 66564 - DNA, 22 bp, Homo sapiens
  source 1..22: mol_type = genomic DNA
taaatacagaccaagagccttc

SEQ ID NO: 66565 - DNA, 23 bp, Homo sapiens
  source 1..23: mol_type = genomic DNA
taaatacagaccaagagccttca

SEQ ID NO: 66566 - DNA, 20 bp, Homo sapiens
  source 1..20: mol_type = genomic DNA
taaatagtaccgttaacttc

SEQ ID NO: 66567 - DNA, 21 bp, Homo sapiens
  source 1..21: mol_type = genomic DNA
taaatagtaccgttaacttcc

SEQ ID NO: 66568 - DNA, 21 bp, Homo sapiens
  source 1..21: mol_type = genomic DNA
taaatcctatatatcttacca

SEQ ID NO: 66569 - DNA, 19 bp, Homo sapiens
  source 1..19: mol_type = genomic DNA
taacaacatggctttctca

SEQ ID NO: 66570 - DNA, 21 bp, Homo sapiens
  source 1..21: mol_type = genomic DNA
taacaacatggctttctcacc

SEQ ID NO: 66571 - DNA, 22 bp, Homo sapiens
  source 1..22: mol_type = genomic DNA
taacaacatggctttctcacca

SEQ ID NO: 66572 - DNA, 19 bp, Homo sapiens
  source 1..19: mol_type = genomic DNA
taacacaaagcacccaact

SEQ ID NO: 66573 - DNA, 16 bp, Homo sapiens
  source 1..16: mol_type = genomic DNA
taaccaaaacatcaga

SEQ ID NO: 66574 - DNA, 20 bp, Homo sapiens
  source 1..20: mol_type = genomic DNA
taaccaaaacatcagattgt

SEQ ID NO: 66575 - DNA, 19 bp, Homo sapiens
  source 1..19: mol_type = genomic DNA
taacccagaggtcgatgga

SEQ ID NO: 66576 - DNA, 20 bp, Homo sapiens
  source 1..20: mol_type = genomic DNA
taacccagaggtcgatggat

SEQ ID NO: 66577 - DNA, 22 bp, Homo sapiens
  source 1..22: mol_type = genomic DNA
taacccagaggtcgatggatcg

SEQ ID NO: 66578 - DNA, 23 bp, Homo sapiens
  source 1..23: mol_type = genomic DNA
taacccagaggtcgatggatcga

SEQ ID NO: 66579 - DNA, 22 bp, Homo sapiens
  source 1..22: mol_type = genomic DNA
taacgccaaggtcgcgggttcg

SEQ ID NO: 66580 - DNA, 23 bp, Homo sapiens
  source 1..23: mol_type = genomic DNA
taacgccaaggtcgcgggttcga

SEQ ID NO: 66581 - DNA, 24 bp, Homo sapiens
  source 1..24: mol_type = genomic DNA
taacgccaaggtcgcgggttcgat

SEQ ID NO: 66582 - DNA, 17 bp, Homo sapiens
  source 1..17: mol_type = genomic DNA
taactagttttgacaac

SEQ ID NO: 66583 - DNA, 16 bp, Homo sapiens
  source 1..16: mol_type = genomic DNA
taacttgaccgctctg

SEQ ID NO: 66584 - DNA, 17 bp, Homo sapiens
  source 1..17: mol_type = genomic DNA
taacttgaccgctctga

SEQ ID NO: 66585 - DNA, 18 bp, Homo sapiens
  source 1..18: mol_type = genomic DNA
taacttgaccgctctgac

SEQ ID NO: 66586 - DNA, 19 bp, Homo sapiens
  source 1..19: mol_type = genomic DNA
taacttgaccgctctgacc

SEQ ID NO: 66587 - DNA, 20 bp, Homo sapiens
  source 1..20: mol_type = genomic DNA
taacttgaccgctctgacca

SEQ ID NO: 66588 - DNA, 19 bp, Homo sapiens
  source 1..19: mol_type = genomic DNA
taagagaaccaacacctct

SEQ ID NO: 66589 - DNA, 16 bp, Homo sapiens
  source 1..16: mol_type = genomic DNA
taagatggcagagccc

SEQ ID NO: 66590 - DNA, 21 bp, Homo sapiens
  source 1..21: mol_type = genomic DNA
taagatggcagagcccggtaa

SEQ ID NO: 66591 - DNA, 22 bp, Homo sapiens
  source 1..22: mol_type = genomic DNA
taagatggcagagcccggtaat

SEQ ID NO: 66592 - DNA, 17 bp, Homo sapiens
  source 1..17: mol_type = genomic DNA
taagccagggattgtgg

SEQ ID NO: 66593 - DNA, 19 bp, Homo sapiens
  source 1..19: mol_type = genomic DNA
taagccagggattgtgggt

SEQ ID NO: 66594 - DNA, 20 bp, Homo sapiens
  source 1..20: mol_type = genomic DNA
taagccagggattgtgggtt

SEQ ID NO: 66595 - DNA, 21 bp, Homo sapiens
  source 1..21: mol_type = genomic DNA
taagccagggattgtgggttc

SEQ ID NO: 66596 - DNA, 16 bp, Homo sapiens
  source 1..16: mol_type = genomic DNA
taagctatcgggccca

SEQ ID NO: 66597 - DNA, 17 bp, Homo sapiens
  source 1..17: mol_type = genomic DNA
taagctatcgggcccat

SEQ ID NO: 66598 - DNA, 18 bp, Homo sapiens
  source 1..18: mol_type = genomic DNA
taagctatcgggcccata

SEQ ID NO: 66599 - DNA, 19 bp, Homo sapiens
  source 1..19: mol_type = genomic DNA
taagctatcgggcccatac

SEQ ID NO: 66600 - DNA, 20 bp, Homo sapiens
  source 1..20: mol_type = genomic DNA
taagctatcgggcccatacc

SEQ ID NO: 66601 - DNA, 23 bp, Homo sapiens
  source 1..23: mol_type = genomic DNA
taagctatcgggcccataccccg

SEQ ID NO: 66602 - DNA, 24 bp, Homo sapiens
  source 1..24: mol_type = genomic DNA
taagctatcgggcccataccccga

SEQ ID NO: 66603 - DNA, 25 bp, Homo sapiens
  source 1..25: mol_type = genomic DNA
taagctatcgggcccataccccgaa

SEQ ID NO: 66604 - DNA, 16 bp, Homo sapiens
  source 1..16: mol_type = genomic DNA
taaggtcagctaaata

SEQ ID NO: 66605 - DNA, 18 bp, Homo sapiens
  source 1..18: mol_type = genomic DNA
taaggtcagctaaataag

SEQ ID NO: 66606 - DNA, 19 bp, Homo sapiens
  source 1..19: mol_type = genomic DNA
taaggtcagctaaataagc

SEQ ID NO: 66607 - DNA, 20 bp, Homo sapiens
  source 1..20: mol_type = genomic DNA
taagtcccattggtctagcc

SEQ ID NO: 66608 - DNA, 19 bp, Homo sapiens
  source 1..19: mol_type = genomic DNA
taagttaaagattaagaga

SEQ ID NO: 66609 - DNA, 22 bp, Homo sapiens
  source 1..22: mol_type = genomic DNA
taagttaaagattaagagaacc

SEQ ID NO: 66610 - DNA, 16 bp, Homo sapiens
  source 1..16: mol_type = genomic DNA
taataggagcttaaac

SEQ ID NO: 66611 - DNA, 17 bp, Homo sapiens
  source 1..17: mol_type = genomic DNA
taataggagcttaaacc

SEQ ID NO: 66612 - DNA, 18 bp, Homo sapiens
  source 1..18: mol_type = genomic DNA
taataggagcttaaaccc

SEQ ID NO: 66613 - DNA, 19 bp, Homo sapiens
  source 1..19: mol_type = genomic DNA
taataggagcttaaacccc

SEQ ID NO: 66614 - DNA, 20 bp, Homo sapiens
  source 1..20: mol_type = genomic DNA
taataggagcttaaaccccc

SEQ ID NO: 66615 - DNA, 18 bp, Homo sapiens
  source 1..18: mol_type = genomic DNA
taatcatatttaccaacc

SEQ ID NO: 66616 - DNA, 19 bp, Homo sapiens
  source 1..19: mol_type = genomic DNA
taatcatatttaccaacca

SEQ ID NO: 66617 - DNA, 19 bp, Homo sapiens
  source 1..19: mol_type = genomic DNA
taatccattgtgctttgca

SEQ ID NO: 66618 - DNA, 21 bp, Homo sapiens
  source 1..21: mol_type = genomic DNA
taatccattgtgctttgcacg

SEQ ID NO: 66619 - DNA, 22 bp, Homo sapiens
  source 1..22: mol_type = genomic DNA
taatccattgtgctttgcacgc

SEQ ID NO: 66620 - DNA, 23 bp, Homo sapiens
  source 1..23: mol_type = genomic DNA
taatccattgtgctttgcacgcg

SEQ ID NO: 66621 - DNA, 24 bp, Homo sapiens
  source 1..24: mol_type = genomic DNA
taatccattgtgctttgcacgcgt

SEQ ID NO: 66622 - DNA, 17 bp, Homo sapiens
  source 1..17: mol_type = genomic DNA
taatctgaaggtcgtga

SEQ ID NO: 66623 - DNA, 21 bp, Homo sapiens
  source 1..21: mol_type = genomic DNA
taatgccgaggttgtgagttc

SEQ ID NO: 66624 - DNA, 23 bp, Homo sapiens
  source 1..23: mol_type = genomic DNA
taatgccgaggttgtgagttcga

SEQ ID NO: 66625 - DNA, 17 bp, Homo sapiens
  source 1..17: mol_type = genomic DNA
taatggataaggcactg

SEQ ID NO: 66626 - DNA, 16 bp, Homo sapiens
  source 1..16: mol_type = genomic DNA
taatggataaggcatc

SEQ ID NO: 66627 - DNA, 17 bp, Homo sapiens
  source 1..17: mol_type = genomic DNA
taatggataaggcatca

SEQ ID NO: 66628 - DNA, 17 bp, Homo sapiens
  source 1..17: mol_type = genomic DNA
taatggataaggcattg

SEQ ID NO: 66629 - DNA, 19 bp, Homo sapiens
  source 1..19: mol_type = genomic DNA
taatggtggagttaaagac

SEQ ID NO: 66630 - DNA, 20 bp, Homo sapiens
  source 1..20: mol_type = genomic DNA
taatggtggagttaaagact

SEQ ID NO: 66631 - DNA, 18 bp, Homo sapiens
  source 1..18: mol_type = genomic DNA
taattaaagtggctgatt

SEQ ID NO: 66632 - DNA, 21 bp, Homo sapiens
  source 1..21: mol_type = genomic DNA
taattaaagtggctgatttgc

SEQ ID NO: 66633 - DNA, 16 bp, Homo sapiens
  source 1..16: mol_type = genomic DNA
tacaacgatggttttt

SEQ ID NO: 66634 - DNA, 18 bp, Homo sapiens
  source 1..18: mol_type = genomic DNA
tacaacgatggtttttca

SEQ ID NO: 66635 - DNA, 19 bp, Homo sapiens
  source 1..19: mol_type = genomic DNA
tacaacgatggtttttcat

SEQ ID NO: 66636 - DNA, 23 bp, Homo sapiens
  source 1..23: mol_type = genomic DNA
tacaacgatggtttttcatatca

SEQ ID NO: 66637 - DNA, 17 bp, Homo sapiens
  source 1..17: mol_type = genomic DNA
tacacttaggagatttc

SEQ ID NO: 66638 - DNA, 18 bp, Homo sapiens
  source 1..18: mol_type = genomic DNA
tacacttaggagatttca

SEQ ID NO: 66639 - DNA, 20 bp, Homo sapiens
  source 1..20: mol_type = genomic DNA
tacacttaggagatttcaac

SEQ ID NO: 66640 - DNA, 21 bp, Homo sapiens
  source 1..21: mol_type = genomic DNA
tacacttaggagatttcaact

SEQ ID NO: 66641 - DNA, 18 bp, Homo sapiens
  source 1..18: mol_type = genomic DNA
tacagaccaagagccttc

SEQ ID NO: 66642 - DNA, 19 bp, Homo sapiens
  source 1..19: mol_type = genomic DNA
tacagaccaagagccttca

SEQ ID NO: 66643 - DNA, 16 bp, Homo sapiens
  source 1..16: mol_type = genomic DNA
tacagtcagaggttca

SEQ ID NO: 66644 - DNA, 24 bp, Homo sapiens
  source 1..24: mol_type = genomic DNA
tacagtcagaggttcaattcctct

SEQ ID NO: 66645 - DNA, 17 bp, Homo sapiens
  source 1..17: mol_type = genomic DNA
tacccttcccgtactac

SEQ ID NO: 66646 - DNA, 18 bp, Homo sapiens
  source 1..18: mol_type = genomic DNA
tacccttcccgtactacc

SEQ ID NO: 66647 - DNA, 19 bp, Homo sapiens
  source 1..19: mol_type = genomic DNA
tacccttcccgtactacca

SEQ ID NO: 66648 - DNA, 18 bp, Homo sapiens
  source 1..18: mol_type = genomic DNA
tacctcctcaaagcaata

SEQ ID NO: 66649 - DNA, 20 bp, Homo sapiens
  source 1..20: mol_type = genomic DNA
tacctcctcaaagcaataca

SEQ ID NO: 66650 - DNA, 19 bp, Homo sapiens
  source 1..19: mol_type = genomic DNA
tacgaccccttatttaccc

SEQ ID NO: 66651 - DNA, 20 bp, Homo sapiens
  source 1..20: mol_type = genomic DNA
tacgaccccttatttacccc

SEQ ID NO: 66652 - DNA, 21 bp, Homo sapiens
  source 1..21: mol_type = genomic DNA
tacgaccccttatttacccca

SEQ ID NO: 66653 - DNA, 16 bp, Homo sapiens
  source 1..16: mol_type = genomic DNA
tacttaatttctgcca

SEQ ID NO: 66654 - DNA, 17 bp, Homo sapiens
  source 1..17: mol_type = genomic DNA
tagaatcttagctttgg

SEQ ID NO: 66655 - DNA, 24 bp, Homo sapiens
  source 1..24: mol_type = genomic DNA
tagaatcttagctttgggtgctaa

SEQ ID NO: 66656 - DNA, 25 bp, Homo sapiens
  source 1..25: mol_type = genomic DNA
tagaatcttagctttgggtgctaat

SEQ ID NO: 66657 - DNA, 17 bp, Homo sapiens
  source 1..17: mol_type = genomic DNA
tagaattctcgcctgcc

SEQ ID NO: 66658 - DNA, 19 bp, Homo sapiens
  source 1..19: mol_type = genomic DNA
tagaattctcgcctgccac

SEQ ID NO: 66659 - DNA, 20 bp, Homo sapiens
  source 1..20: mol_type = genomic DNA
tagaattctcgcctgccacg

SEQ ID NO: 66660 - DNA, 21 bp, Homo sapiens
  source 1..21: mol_type = genomic DNA
tagaattctcgcctgccacgc

SEQ ID NO: 66661 - DNA, 16 bp, Homo sapiens
  source 1..16: mol_type = genomic DNA
tagacgggctcacatc

SEQ ID NO: 66662 - DNA, 17 bp, Homo sapiens
  source 1..17: mol_type = genomic DNA
tagacgggctcacatca

SEQ ID NO: 66663 - DNA, 18 bp, Homo sapiens
  source 1..18: mol_type = genomic DNA
tagacgggctcacatcac

SEQ ID NO: 66664 - DNA, 19 bp, Homo sapiens
  source 1..19: mol_type = genomic DNA
tagacgggctcacatcacc

SEQ ID NO: 66665 - DNA, 20 bp, Homo sapiens
  source 1..20: mol_type = genomic DNA
tagacgggctcacatcaccc

SEQ ID NO: 66666 - DNA, 21 bp, Homo sapiens
  source 1..21: mol_type = genomic DNA
tagacgggctcacatcacccc

SEQ ID NO: 66667 - DNA, 22 bp, Homo sapiens
  source 1..22: mol_type = genomic DNA
tagacgggctcacatcacccca

SEQ ID NO: 66668 - DNA, 25 bp, Homo sapiens
  source 1..25: mol_type = genomic DNA
tagacgggctcacatcaccccataa

SEQ ID NO: 66669 - DNA, 17 bp, Homo sapiens
  source 1..17: mol_type = genomic DNA
tagagcatgagactctt

SEQ ID NO: 66670 - DNA, 17 bp, Homo sapiens
  source 1..17: mol_type = genomic DNA
tagagcatgggactctt

SEQ ID NO: 66671 - DNA, 22 bp, Homo sapiens
  source 1..22: mol_type = genomic DNA
tagagccagactgcctgggttt

SEQ ID NO: 66672 - DNA, 17 bp, Homo sapiens
  source 1..17: mol_type = genomic DNA
tagagtaaataatagga

SEQ ID NO: 66673 - DNA, 19 bp, Homo sapiens
  source 1..19: mol_type = genomic DNA
tagagtaaataataggagc

SEQ ID NO: 66674 - DNA, 17 bp, Homo sapiens
  source 1..17: mol_type = genomic DNA
tagattgaagccagttg

SEQ ID NO: 66675 - DNA, 18 bp, Homo sapiens
  source 1..18: mol_type = genomic DNA
tagattgaagccagttga

SEQ ID NO: 66676 - DNA, 17 bp, Homo sapiens
  source 1..17: mol_type = genomic DNA
tagcattaaccttttaa

SEQ ID NO: 66677 - DNA, 18 bp, Homo sapiens
  source 1..18: mol_type = genomic DNA
tagcattaaccttttaag

SEQ ID NO: 66678 - DNA, 19 bp, Homo sapiens
  source 1..19: mol_type = genomic DNA
tagcattaaccttttaagt

SEQ ID NO: 66679 - DNA, 20 bp, Homo sapiens
  source 1..20: mol_type = genomic DNA
tagcattaaccttttaagtt

SEQ ID NO: 66680 - DNA, 21 bp, Homo sapiens
  source 1..21: mol_type = genomic DNA
tagcattaaccttttaagtta

SEQ ID NO: 66681 - DNA, 16 bp, Homo sapiens
  source 1..16: mol_type = genomic DNA
tagctcagtcggtaga

SEQ ID NO: 66682 - DNA, 18 bp, Homo sapiens
  source 1..18: mol_type = genomic DNA
tagctcagtcggtagagc

SEQ ID NO: 66683 - DNA, 25 bp, Homo sapiens
  source 1..25: mol_type = genomic DNA
tagctcagtcggtagagcatgggac

SEQ ID NO: 66684 - DNA, 16 bp, Homo sapiens
  source 1..16: mol_type = genomic DNA
taggagatttcaactt

SEQ ID NO: 66685 - DNA, 17 bp, Homo sapiens
  source 1..17: mol_type = genomic DNA
taggagatttcaactta

SEQ ID NO: 66686 - DNA, 18 bp, Homo sapiens
  source 1..18: mol_type = genomic DNA
taggagatttcaacttaa

SEQ ID NO: 66687 - DNA, 19 bp, Homo sapiens
  source 1..19: mol_type = genomic DNA
taggagatttcaacttaac

SEQ ID NO: 66688 - DNA, 20 bp, Homo sapiens
  source 1..20: mol_type = genomic DNA
taggagatttcaacttaact

SEQ ID NO: 66689 - DNA, 21 bp, Homo sapiens
  source 1..21: mol_type = genomic DNA
taggagatttcaacttaactt

SEQ ID NO: 66690 - DNA, 25 bp, Homo sapiens
  source 1..25: mol_type = genomic DNA
taggagatttcaacttaacttgacc

SEQ ID NO: 66691 - DNA, 16 bp, Homo sapiens
  source 1..16: mol_type = genomic DNA
taggagcttaaacccc

SEQ ID NO: 66692 - DNA, 17 bp, Homo sapiens
  source 1..17: mol_type = genomic DNA
taggagcttaaaccccc

SEQ ID NO: 66693 - DNA, 20 bp, Homo sapiens
  source 1..20: mol_type = genomic DNA
taggagcttaaaccccctta

SEQ ID NO: 66694 - DNA, 16 bp, Homo sapiens
  source 1..16: mol_type = genomic DNA
taggatggggtgtgat

SEQ ID NO: 66695 - DNA, 17 bp, Homo sapiens
  source 1..17: mol_type = genomic DNA
taggatggggtgtgata

SEQ ID NO: 66696 - DNA, 18 bp, Homo sapiens
  source 1..18: mol_type = genomic DNA
taggatggggtgtgatag

SEQ ID NO: 66697 - DNA, 19 bp, Homo sapiens
  source 1..19: mol_type = genomic DNA
taggatggggtgtgatagg

SEQ ID NO: 66698 - DNA, 20 bp, Homo sapiens
  source 1..20: mol_type = genomic DNA
taggatggggtgtgataggt

SEQ ID NO: 66699 - DNA, 21 bp, Homo sapiens
  source 1..21: mol_type = genomic DNA
taggatggggtgtgataggtg

SEQ ID NO: 66700 - DNA, 22 bp, Homo sapiens
  source 1..22: mol_type = genomic DNA
taggatggggtgtgataggtgg

SEQ ID NO: 66701 - DNA, 23 bp, Homo sapiens
  source 1..23: mol_type = genomic DNA
taggatggggtgtgataggtggc

SEQ ID NO: 66702 - DNA, 24 bp, Homo sapiens
  source 1..24: mol_type = genomic DNA
taggatggggtgtgataggtggca

SEQ ID NO: 66703 - DNA, 17 bp, Homo sapiens
  source 1..17: mol_type = genomic DNA
taggattcctggttttc

SEQ ID NO: 66704 - DNA, 16 bp, Homo sapiens
  source 1..16: mol_type = genomic DNA
taggattcggcgctct

SEQ ID NO: 66705 - DNA, 17 bp, Homo sapiens
  source 1..17: mol_type = genomic DNA
taggattcggcgctctc

SEQ ID NO: 66706 - DNA, 17 bp, Homo sapiens
  source 1..17: mol_type = genomic DNA
taggattcggcgctttc

SEQ ID NO: 66707 - DNA, 20 bp, Homo sapiens
  source 1..20: mol_type = genomic DNA
taggcctctttttaccacca

SEQ ID NO: 66708 - DNA, 18 bp, Homo sapiens
  source 1..18: mol_type = genomic DNA
taggggtatgattctcgc

SEQ ID NO: 66709 - DNA, 19 bp, Homo sapiens
  source 1..19: mol_type = genomic DNA
taggggtatgattctcgct

SEQ ID NO: 66710 - DNA, 20 bp, Homo sapiens
  source 1..20: mol_type = genomic DNA
taggggtatgattctcgctt

SEQ ID NO: 66711 - DNA, 23 bp, Homo sapiens
  source 1..23: mol_type = genomic DNA
taggggtatgattctcggtttgg

SEQ ID NO: 66712 - DNA, 20 bp, Homo sapiens
  source 1..20: mol_type = genomic DNA
taggtggcacggagaatttt

SEQ ID NO: 66713 - DNA, 17 bp, Homo sapiens
  source 1..17: mol_type = genomic DNA
tagtaccgttaacttcc

SEQ ID NO: 66714 - DNA, 21 bp, Homo sapiens
  source 1..21: mol_type = genomic DNA
tagtaccgttaacttccaatt

SEQ ID NO: 66715 - DNA, 22 bp, Homo sapiens
  source 1..22: mol_type = genomic DNA
tagtaccgttaacttccaatta

SEQ ID NO: 66716 - DNA, 16 bp, Homo sapiens
  source 1..16: mol_type = genomic DNA
tagtactctgcgttgt

SEQ ID NO: 66717 - DNA, 17 bp, Homo sapiens
  source 1..17: mol_type = genomic DNA
tagtccgtgcgagaata

SEQ ID NO: 66718 - DNA, 18 bp, Homo sapiens
  source 1..18: mol_type = genomic DNA
tagtccgtgcgagaatac

SEQ ID NO: 66719 - DNA, 19 bp, Homo sapiens
  source 1..19: mol_type = genomic DNA
tagtccgtgcgagaatacc

SEQ ID NO: 66720 - DNA, 20 bp, Homo sapiens
  source 1..20: mol_type = genomic DNA
tagtccgtgcgagaatacca

SEQ ID NO: 66721 - DNA, 20 bp, Homo sapiens
  source 1..20: mol_type = genomic DNA
tagtggtatcatgcaagatt

SEQ ID NO: 66722 - DNA, 19 bp, Homo sapiens
  source 1..19: mol_type = genomic DNA
tagtggtgagtatccccgc

SEQ ID NO: 66723 - DNA, 18 bp, Homo sapiens
  source 1..18: mol_type = genomic DNA
tagtggttaggattcggc

SEQ ID NO: 66724 - DNA, 20 bp, Homo sapiens
  source 1..20: mol_type = genomic DNA
tagtggttaggattcggcgc

SEQ ID NO: 66725 - DNA, 21 bp, Homo sapiens
  source 1..21: mol_type = genomic DNA
tagtggttaggattcggcgct

SEQ ID NO: 66726 - DNA, 22 bp, Homo sapiens
  source 1..22: mol_type = genomic DNA
tagtggttaggattcggcgctc

SEQ ID NO: 66727 - DNA, 18 bp, Homo sapiens
  source 1..18: mol_type = genomic DNA
tagtggttagtactctgc

SEQ ID NO: 66728 - DNA, 19 bp, Homo sapiens
  source 1..19: mol_type = genomic DNA
tagtggttagtactctgcg

SEQ ID NO: 66729 - DNA, 21 bp, Homo sapiens
  source 1..21: mol_type = genomic DNA
tagtttaaccaaaacatcaga

SEQ ID NO: 66730 - DNA, 19 bp, Homo sapiens
  source 1..19: mol_type = genomic DNA
tatacccttcccgtactac

SEQ ID NO: 66731 - DNA, 20 bp, Homo sapiens
  source 1..20: mol_type = genomic DNA
tatacccttcccgtactacc

SEQ ID NO: 66732 - DNA, 21 bp, Homo sapiens
  source 1..21: mol_type = genomic DNA
tatacccttcccgtactacca

SEQ ID NO: 66733 - DNA, 18 bp, Homo sapiens
  source 1..18: mol_type = genomic DNA
tatagtggtgagtatccc

SEQ ID NO: 66734 - DNA, 20 bp, Homo sapiens
  source 1..20: mol_type = genomic DNA
tatagtggttagtactctgc

SEQ ID NO: 66735 - DNA, 21 bp, Homo sapiens
  source 1..21: mol_type = genomic DNA
tatagtggttagtactctgcg

SEQ ID NO: 66736 - DNA, 22 bp, Homo sapiens
  source 1..22: mol_type = genomic DNA
tatagtggttagtactctgcgt

SEQ ID NO: 66737 - DNA, 23 bp, Homo sapiens
  source 1..23: mol_type = genomic DNA
tatagtggttagtactctgcgtt

SEQ ID NO: 66738 - DNA, 23 bp, Homo sapiens
  source 1..23: mol_type = genomic DNA
tatagtttaaccaaaacatcaga

SEQ ID NO: 66739 - DNA, 19 bp, Homo sapiens
  source 1..19: mol_type = genomic DNA
tatcattggtcgtggttgt

SEQ ID NO: 66740 - DNA, 20 bp, Homo sapiens
  source 1..20: mol_type = genomic DNA
tatcattggtcgtggttgta

SEQ ID NO: 66741 - DNA, 23 bp, Homo sapiens
  source 1..23: mol_type = genomic DNA
tatcattggtcgtggttgtagtc

SEQ ID NO: 66742 - DNA, 24 bp, Homo sapiens
  source 1..24: mol_type = genomic DNA
tatcattggtcgtggttgtagtcc

SEQ ID NO: 66743 - DNA, 19 bp, Homo sapiens
  source 1..19: mol_type = genomic DNA
tatccattggtcttaggcc

SEQ ID NO: 66744 - DNA, 16 bp, Homo sapiens
  source 1..16: mol_type = genomic DNA
tatcgggcccataccc

SEQ ID NO: 66745 - DNA, 17 bp, Homo sapiens
  source 1..17: mol_type = genomic DNA
tatcgggcccatacccc

SEQ ID NO: 66746 - DNA, 18 bp, Homo sapiens
  source 1..18: mol_type = genomic DNA
tatcgggcccataccccg

SEQ ID NO: 66747 - DNA, 19 bp, Homo sapiens
  source 1..19: mol_type = genomic DNA
tatcgggcccataccccga

SEQ ID NO: 66748 - DNA, 20 bp, Homo sapiens
  source 1..20: mol_type = genomic DNA
tatcgggcccataccccgaa

SEQ ID NO: 66749 - DNA, 21 bp, Homo sapiens
  source 1..21: mol_type = genomic DNA
tatcgggcccataccccgaaa

SEQ ID NO: 66750 - DNA, 19 bp, Homo sapiens
  source 1..19: mol_type = genomic DNA
tatgataatcatatttacc

SEQ ID NO: 66751 - DNA, 20 bp, Homo sapiens
  source 1..20: mol_type = genomic DNA
tatgataatcatatttacca

SEQ ID NO: 66752 - DNA, 22 bp, Homo sapiens
  source 1..22: mol_type = genomic DNA
tatgataatcatatttaccaac

SEQ ID NO: 66753 - DNA, 23 bp, Homo sapiens
  source 1..23: mol_type = genomic DNA
tatgataatcatatttaccaacc

SEQ ID NO: 66754 - DNA, 24 bp, Homo sapiens
  source 1..24: mol_type = genomic DNA
tatgataatcatatttaccaacca

SEQ ID NO: 66755 - DNA, 17 bp, Homo sapiens
  source 1..17: mol_type = genomic DNA
tatgattctcggtttgg

SEQ ID NO: 66756 - DNA, 16 bp, Homo sapiens
  source 1..16: mol_type = genomic DNA
tcaaaaaagagtacca

SEQ ID NO: 66757 - DNA, 18 bp, Homo sapiens
  source 1..18: mol_type = genomic DNA
tcaaacctgccggggctt

SEQ ID NO: 66758 - DNA, 19 bp, Homo sapiens
  source 1..19: mol_type = genomic DNA
tcaaacctgccggggcttc

SEQ ID NO: 66759 - DNA, 20 bp, Homo sapiens
  source 1..20: mol_type = genomic DNA
tcaaacctgccggggcttcc

SEQ ID NO: 66760 - DNA, 17 bp, Homo sapiens
  source 1..17: mol_type = genomic DNA
tcaaagcaatacactga

SEQ ID NO: 66761 - DNA, 18 bp, Homo sapiens
  source 1..18: mol_type = genomic DNA
tcaaagcaatacactgaa

SEQ ID NO: 66762 - DNA, 17 bp, Homo sapiens
  source 1..17: mol_type = genomic DNA
tcaaagttaaattatag

SEQ ID NO: 66763 - DNA, 18 bp, Homo sapiens
  source 1..18: mol_type = genomic DNA
tcaaagttaaattatagg

SEQ ID NO: 66764 - DNA, 20 bp, Homo sapiens
  source 1..20: mol_type = genomic DNA
tcaaagttaaattataggct

SEQ ID NO: 66765 - DNA, 21 bp, Homo sapiens
  source 1..21: mol_type = genomic DNA
tcaaatcccggacgagccccc

SEQ ID NO: 66766 - DNA, 21 bp, Homo sapiens
  source 1..21: mol_type = genomic DNA
tcaaatctcggtggaacctcc

SEQ ID NO: 66767 - DNA, 22 bp, Homo sapiens
  source 1..22: mol_type = genomic DNA
tcaaatctcggtggaacctcca

SEQ ID NO: 66768 - DNA, 19 bp, Homo sapiens
  source 1..19: mol_type = genomic DNA
tcaacttaacttgaccgct

SEQ ID NO: 66769 - DNA, 20 bp, Homo sapiens
  source 1..20: mol_type = genomic DNA
tcaacttaacttgaccgctc

SEQ ID NO: 66770 - DNA, 21 bp, Homo sapiens
  source 1..21: mol_type = genomic DNA
tcaacttaacttgaccgctct

SEQ ID NO: 66771 - DNA, 23 bp, Homo sapiens
  source 1..23: mol_type = genomic DNA
tcaacttaacttgaccgctctga

SEQ ID NO: 66772 - DNA, 24 bp, Homo sapiens
  source 1..24: mol_type = genomic DNA
tcaacttaacttgaccgctctgac

SEQ ID NO: 66773 - DNA, 25 bp, Homo sapiens
  source 1..25: mol_type = genomic DNA
tcaacttaacttgaccgctctgacc

SEQ ID NO: 66774 - DNA, 19 bp, Homo sapiens
  source 1..19: mol_type = genomic DNA
tcaagttctggtctccgga

SEQ ID NO: 66775 - DNA, 16 bp, Homo sapiens
  source 1..16: mol_type = genomic DNA
tcacaagaactgctaa

SEQ ID NO: 66776 - DNA, 17 bp, Homo sapiens
  source 1..17: mol_type = genomic DNA
tcacaagaactgctaac

SEQ ID NO: 66777 - DNA, 18 bp, Homo sapiens
  source 1..18: mol_type = genomic DNA
tcacaagaactgctaact

SEQ ID NO: 66778 - DNA, 19 bp, Homo sapiens
  source 1..19: mol_type = genomic DNA
tcacaagaactgctaactc

SEQ ID NO: 66779 - DNA, 20 bp, Homo sapiens
  source 1..20: mol_type = genomic DNA
tcacaagaactgctaactca

SEQ ID NO: 66780 - DNA, 22 bp, Homo sapiens
  source 1..22: mol_type = genomic DNA
tcacaagaactgctaactcatg

SEQ ID NO: 66781 - DNA, 23 bp, Homo sapiens
  source 1..23: mol_type = genomic DNA
tcacaagaactgctaactcatgc

SEQ ID NO: 66782 - DNA, 16 bp, Homo sapiens
  source 1..16: mol_type = genomic DNA
tcacatcaccccataa

SEQ ID NO: 66783 - DNA, 17 bp, Homo sapiens
  source 1..17: mol_type = genomic DNA
tcacatcaccccataaa

SEQ ID NO: 66784 - DNA, 18 bp, Homo sapiens
  source 1..18: mol_type = genomic DNA
tcacatcaccccataaac

SEQ ID NO: 66785 - DNA, 19 bp, Homo sapiens
  source 1..19: mol_type = genomic DNA
tcacatcaccccataaaca

SEQ ID NO: 66786 - DNA, 20 bp, Homo sapiens
  source 1..20: mol_type = genomic DNA
tcacatcaccccataaacac

SEQ ID NO: 66787 - DNA, 21 bp, Homo sapiens
  source 1..21: mol_type = genomic DNA
tcacatcaccccataaacacc

SEQ ID NO: 66788 - DNA, 22 bp, Homo sapiens
  source 1..22: mol_type = genomic DNA
tcacatcaccccataaacacca

SEQ ID NO: 66789 - DNA, 16 bp, Homo sapiens
  source 1..16: mol_type = genomic DNA
tcaccccataaacacc

SEQ ID NO: 66790 - DNA, 17 bp, Homo sapiens
  source 1..17: mol_type = genomic DNA
tcaccccataaacacca

SEQ ID NO: 66791 - DNA, 16 bp, Homo sapiens
  source 1..16: mol_type = genomic DNA
tcacgtcggggtcacc

SEQ ID NO: 66792 - DNA, 17 bp, Homo sapiens
  source 1..17: mol_type = genomic DNA
tcacgtcggggtcacca

SEQ ID NO: 66793 - DNA, 16 bp, Homo sapiens
  source 1..16: mol_type = genomic DNA
tcagaggttcaattcc

SEQ ID NO: 66794 - DNA, 19 bp, Homo sapiens
  source 1..19: mol_type = genomic DNA
tcagaggttcaattcctct

SEQ ID NO: 66795 - DNA, 18 bp, Homo sapiens
  source 1..18: mol_type = genomic DNA
tcagattgtgaatctgac

SEQ ID NO: 66796 - DNA, 19 bp, Homo sapiens
  source 1..19: mol_type = genomic DNA
tcagattgtgaatctgaca

SEQ ID NO: 66797 - DNA, 21 bp, Homo sapiens
  source 1..21: mol_type = genomic DNA
tcagattgtgaatctgacaac

SEQ ID NO: 66798 - DNA, 22 bp, Homo sapiens
  source 1..22: mol_type = genomic DNA
tcagattgtgaatctgacaaca

SEQ ID NO: 66799 - DNA, 17 bp, Homo sapiens
  source 1..17: mol_type = genomic DNA
tcagtaagttgcaatac

SEQ ID NO: 66800 - DNA, 18 bp, Homo sapiens
  source 1..18: mol_type = genomic DNA
tcagtaagttgcaatact

SEQ ID NO: 66801 - DNA, 17 bp, Homo sapiens
  source 1..17: mol_type = genomic DNA
tcagtcggtagagcatc

SEQ ID NO: 66802 - DNA, 18 bp, Homo sapiens
  source 1..18: mol_type = genomic DNA
tcagtcggtagagcatca

SEQ ID NO: 66803 - DNA, 19 bp, Homo sapiens
  source 1..19: mol_type = genomic DNA
tcagtcggtagagcatcag

SEQ ID NO: 66804 - DNA, 20 bp, Homo sapiens
  source 1..20: mol_type = genomic DNA
tcagtcggtagagcatcaga

SEQ ID NO: 66805 - DNA, 21 bp, Homo sapiens
  source 1..21: mol_type = genomic DNA
tcagtcggtagagcatcagac

SEQ ID NO: 66806 - DNA, 22 bp, Homo sapiens
  source 1..22: mol_type = genomic DNA
tcagtcggtagagcatcagact

SEQ ID NO: 66807 - DNA, 18 bp, Homo sapiens
  source 1..18: mol_type = genomic DNA
tcagtcggtagagcatga

SEQ ID NO: 66808 - DNA, 19 bp, Homo sapiens
  source 1..19: mol_type = genomic DNA
tcagtcggtagagcatgag

SEQ ID NO: 66809 - DNA, 20 bp, Homo sapiens
  source 1..20: mol_type = genomic DNA
tcagtcggtagagcatgaga

SEQ ID NO: 66810 - DNA, 21 bp, Homo sapiens
  source 1..21: mol_type = genomic DNA
tcagtcggtagagcatgagac

SEQ ID NO: 66811 - DNA, 22 bp, Homo sapiens
  source 1..22: mol_type = genomic DNA
tcagtcggtagagcatgagact

SEQ ID NO: 66812 - DNA, 23 bp, Homo sapiens
  source 1..23: mol_type = genomic DNA
tcagtcggtagagcatgagactc

SEQ ID NO: 66813 - DNA, 24 bp, Homo sapiens
  source 1..24: mol_type = genomic DNA
tcagtcggtagagcatgagactct

SEQ ID NO: 66814 - DNA, 18 bp, Homo sapiens
  source 1..18: mol_type = genomic DNA
tcagtcggtagagcatgg

SEQ ID NO: 66815 - DNA, 20 bp, Homo sapiens
  source 1..20: mol_type = genomic DNA
tcagtcggtagagcatggga

SEQ ID NO: 66816 - DNA, 21 bp, Homo sapiens
  source 1..21: mol_type = genomic DNA
tcagtcggtagagcatgggac

SEQ ID NO: 66817 - DNA, 22 bp, Homo sapiens
  source 1..22: mol_type = genomic DNA
tcagtcggtagagcatgggact

SEQ ID NO: 66818 - DNA, 23 bp, Homo sapiens
  source 1..23: mol_type = genomic DNA
tcagtcggtagagcatgggactc

SEQ ID NO: 66819 - DNA, 24 bp, Homo sapiens
  source 1..24: mol_type = genomic DNA
tcagtcggtagagcatgggactct

SEQ ID NO: 66820 - DNA, 19 bp, Homo sapiens
  source 1..19: mol_type = genomic DNA
tcagtggtagaattctcgc

SEQ ID NO: 66821 - DNA, 20 bp, Homo sapiens
  source 1..20: mol_type = genomic DNA
tcagtggtagaattctcgcc

SEQ ID NO: 66822 - DNA, 21 bp, Homo sapiens
  source 1..21: mol_type = genomic DNA
tcagtggtagaattctcgcct

SEQ ID NO: 66823 - DNA, 23 bp, Homo sapiens
  source 1..23: mol_type = genomic DNA
tcagtggtagaattctcgcctgc

SEQ ID NO: 66824 - DNA, 19 bp, Homo sapiens
  source 1..19: mol_type = genomic DNA
tcagtggtagagcatttga

SEQ ID NO: 66825 - DNA, 16 bp, Homo sapiens
  source 1..16: mol_type = genomic DNA
tcatatttaccaacca

SEQ ID NO: 66826 - DNA, 20 bp, Homo sapiens
  source 1..20: mol_type = genomic DNA
tcatgcccccatgtctaaca

SEQ ID NO: 66827 - DNA, 21 bp, Homo sapiens
  source 1..21: mol_type = genomic DNA
tcattggtcgtggttgtagtc

SEQ ID NO: 66828 - DNA, 17 bp, Homo sapiens
  source 1..17: mol_type = genomic DNA
tccaaataaaagtacca

SEQ ID NO: 66829 - DNA, 17 bp, Homo sapiens
  source 1..17: mol_type = genomic DNA
tccagcgatccgagttc

SEQ ID NO: 66830 - DNA, 20 bp, Homo sapiens
  source 1..20: mol_type = genomic DNA
tccaggttcgactcctggct

SEQ ID NO: 66831 - DNA, 17 bp, Homo sapiens
  source 1..17: mol_type = genomic DNA
tccattggtcttaggcc

SEQ ID NO: 66832 - DNA, 16 bp, Homo sapiens
  source 1..16: mol_type = genomic DNA
tcccacatggtctagc

SEQ ID NO: 66833 - DNA, 17 bp, Homo sapiens
  source 1..17: mol_type = genomic DNA
tcccacatggtctagcg

SEQ ID NO: 66834 - DNA, 18 bp, Homo sapiens
  source 1..18: mol_type = genomic DNA
tcccacatggtctagcgg

SEQ ID NO: 66835 - DNA, 19 bp, Homo sapiens
  source 1..19: mol_type = genomic DNA
tcccacatggtctagcggt

SEQ ID NO: 66836 - DNA, 20 bp, Homo sapiens
  source 1..20: mol_type = genomic DNA
tcccacatggtctagcggtt

SEQ ID NO: 66837 - DNA, 22 bp, Homo sapiens
  source 1..22: mol_type = genomic DNA
tcccacatggtctagcggttag

SEQ ID NO: 66838 - DNA, 23 bp, Homo sapiens
  source 1..23: mol_type = genomic DNA
tcccacatggtctagcggttagg

SEQ ID NO: 66839 - DNA, 24 bp, Homo sapiens
  source 1..24: mol_type = genomic DNA
tcccacatggtctagcggttagga

SEQ ID NO: 66840 - DNA, 25 bp, Homo sapiens
  source 1..25: mol_type = genomic DNA
tcccacatggtctagcggttaggat

SEQ ID NO: 66841 - DNA, 18 bp, Homo sapiens
  source 1..18: mol_type = genomic DNA
tcccacccagggacgcca

SEQ ID NO: 66842 - DNA, 16 bp, Homo sapiens
  source 1..16: mol_type = genomic DNA
tcccaccgctgccacc

SEQ ID NO: 66843 - DNA, 17 bp, Homo sapiens
  source 1..17: mol_type = genomic DNA
tcccaccgctgccacca

SEQ ID NO: 66844 - DNA, 16 bp, Homo sapiens
  source 1..16: mol_type = genomic DNA
tcccactcctgacacc

SEQ ID NO: 66845 - DNA, 17 bp, Homo sapiens
  source 1..17: mol_type = genomic DNA
tcccactcctgacacca

SEQ ID NO: 66846 - DNA, 16 bp, Homo sapiens
  source 1..16: mol_type = genomic DNA
tcccacttctgacacc

SEQ ID NO: 66847 - DNA, 17 bp, Homo sapiens
  source 1..17: mol_type = genomic DNA
tcccacttctgacacca

SEQ ID NO: 66848 - DNA, 16 bp, Homo sapiens
  source 1..16: mol_type = genomic DNA
tcccagcggggcctcc

SEQ ID NO: 66849 - DNA, 17 bp, Homo sapiens
  source 1..17: mol_type = genomic DNA
tcccagcggggcctcca

SEQ ID NO: 66850 - DNA, 16 bp, Homo sapiens
  source 1..16: mol_type = genomic DNA
tcccagcggtgcctcc

SEQ ID NO: 66851 - DNA, 17 bp, Homo sapiens
  source 1..17: mol_type = genomic DNA
tcccagcggtgcctcca

SEQ ID NO: 66852 - DNA, 18 bp, Homo sapiens
  source 1..18: mol_type = genomic DNA
tcccatatggtctagcgg

SEQ ID NO: 66853 - DNA, 19 bp, Homo sapiens
  source 1..19: mol_type = genomic DNA
tcccatatggtctagcggt

SEQ ID NO: 66854 - DNA, 23 bp, Homo sapiens
  source 1..23: mol_type = genomic DNA
tcccatatggtctagcggttagg

SEQ ID NO: 66855 - DNA, 24 bp, Homo sapiens
  source 1..24: mol_type = genomic DNA
tcccatatggtctagcggttagga

SEQ ID NO: 66856 - DNA, 16 bp, Homo sapiens
  source 1..16: mol_type = genomic DNA
tcccatcctcgtcgcc

SEQ ID NO: 66857 - DNA, 17 bp, Homo sapiens
  source 1..17: mol_type = genomic DNA
tcccatcctcgtcgcca

SEQ ID NO: 66858 - DNA, 16 bp, Homo sapiens
  source 1..16: mol_type = genomic DNA
tcccatctgggtcgcc

SEQ ID NO: 66859 - DNA, 18 bp, Homo sapiens
  source 1..18: mol_type = genomic DNA
tccccagcatctccacca

SEQ ID NO: 66860 - DNA, 18 bp, Homo sapiens
  source 1..18: mol_type = genomic DNA
tccccagtacctccacca

SEQ ID NO: 66861 - DNA, 21 bp, Homo sapiens
  source 1..21: mol_type = genomic DNA
tccccgcgcaggttcgaatcc

SEQ ID NO: 66862 - DNA, 22 bp, Homo sapiens
  source 1..22: mol_type = genomic DNA
tccccgcgcaggttcgaatcct

SEQ ID NO: 66863 - DNA, 17 bp, Homo sapiens
  source 1..17: mol_type = genomic DNA
tccccggcacctccacc

SEQ ID NO: 66864 - DNA, 18 bp, Homo sapiens
  source 1..18: mol_type = genomic DNA
tccccggcacctccacca

SEQ ID NO: 66865 - DNA, 17 bp, Homo sapiens
  source 1..17: mol_type = genomic DNA
tccccggcatctccacc

SEQ ID NO: 66866 - DNA, 18 bp, Homo sapiens
  source 1..18: mol_type = genomic DNA
tccccggcatctccacca

SEQ ID NO: 66867 - DNA, 17 bp, Homo sapiens
  source 1..17: mol_type = genomic DNA
tccccgtacgggccacc

SEQ ID NO: 66868 - DNA, 18 bp, Homo sapiens
  source 1..18: mol_type = genomic DNA
tccccgtacgggccacca

SEQ ID NO: 66869 - DNA, 16 bp, Homo sapiens
  source 1..16: mol_type = genomic DNA
tcccggacgagccccc

SEQ ID NO: 66870 - DNA, 17 bp, Homo sapiens
  source 1..17: mol_type = genomic DNA
tcccggacgagccccca

SEQ ID NO: 66871 - DNA, 16 bp, Homo sapiens
  source 1..16: mol_type = genomic DNA
tcccggccaacgcacc

SEQ ID NO: 66872 - DNA, 17 bp, Homo sapiens
  source 1..17: mol_type = genomic DNA
tcccggccaacgcacca

SEQ ID NO: 66873 - DNA, 16 bp, Homo sapiens
  source 1..16: mol_type = genomic DNA
tcccggccaatgcacc

SEQ ID NO: 66874 - DNA, 17 bp, Homo sapiens
  source 1..17: mol_type = genomic DNA
tcccggccaatgcacca

SEQ ID NO: 66875 - DNA, 17 bp, Homo sapiens
  source 1..17: mol_type = genomic DNA
tcccggcggagtcgcca

SEQ ID NO: 66876 - DNA, 18 bp, Homo sapiens
  source 1..18: mol_type = genomic DNA
tcccgggcggaaacacca

SEQ ID NO: 66877 - DNA, 16 bp, Homo sapiens
  source 1..16: mol_type = genomic DNA
tcccgggcggcgcacc

SEQ ID NO: 66878 - DNA, 17 bp, Homo sapiens
  source 1..17: mol_type = genomic DNA
tcccgggcggcgcacca

SEQ ID NO: 66879 - DNA, 20 bp, Homo sapiens
  source 1..20: mol_type = genomic DNA
tcccgggttcaaatcccgga

SEQ ID NO: 66880 - DNA, 17 bp, Homo sapiens
  source 1..17: mol_type = genomic DNA
tcccgggtttcggcacc

SEQ ID NO: 66881 - DNA, 18 bp, Homo sapiens
  source 1..18: mol_type = genomic DNA
tcccgggtttcggcacca

SEQ ID NO: 66882 - DNA, 17 bp, Homo sapiens
  source 1..17: mol_type = genomic DNA
tcccggtcagggaacca

SEQ ID NO: 66883 - DNA, 17 bp, Homo sapiens
  source 1..17: mol_type = genomic DNA
tcccggtgtgggaacca

SEQ ID NO: 66884 - DNA, 19 bp, Homo sapiens
  source 1..19: mol_type = genomic DNA
tccctggtagtctagtggc

SEQ ID NO: 66885 - DNA, 16 bp, Homo sapiens
  source 1..16: mol_type = genomic DNA
tccctggtggtctagt

SEQ ID NO: 66886 - DNA, 17 bp, Homo sapiens
  source 1..17: mol_type = genomic DNA
tccctggtggtctagtg

SEQ ID NO: 66887 - DNA, 18 bp, Homo sapiens
  source 1..18: mol_type = genomic DNA
tccctggtggtctagtgg

SEQ ID NO: 66888 - DNA, 19 bp, Homo sapiens
  source 1..19: mol_type = genomic DNA
tccctggtggtctagtggc

SEQ ID NO: 66889 - DNA, 24 bp, Homo sapiens
  source 1..24: mol_type = genomic DNA
tccctggtggtctagtggctagga

SEQ ID NO: 66890 - DNA, 19 bp, Homo sapiens
  source 1..19: mol_type = genomic DNA
tccctggtggtctagtggt

SEQ ID NO: 66891 - DNA, 20 bp, Homo sapiens
  source 1..20: mol_type = genomic DNA
tccctggtggtctagtggtt

SEQ ID NO: 66892 - DNA, 22 bp, Homo sapiens
  source 1..22: mol_type = genomic DNA
tccctggtggtctagtggttag

SEQ ID NO: 66893 - DNA, 23 bp, Homo sapiens
  source 1..23: mol_type = genomic DNA
tccctggtggtctagtggttagg

SEQ ID NO: 66894 - DNA, 24 bp, Homo sapiens
  source 1..24: mol_type = genomic DNA
tccctggtggtctagtggttagga

SEQ ID NO: 66895 - DNA, 25 bp, Homo sapiens
  source 1..25: mol_type = genomic DNA
tccctggtggtctagtggttaggat

SEQ ID NO: 66896 - DNA, 17 bp, Homo sapiens
  source 1..17: mol_type = genomic DNA
tccctgtggtctagtgg

SEQ ID NO: 66897 - DNA, 18 bp, Homo sapiens
  source 1..18: mol_type = genomic DNA
tccctgtggtctagtggt

SEQ ID NO: 66898 - DNA, 16 bp, Homo sapiens
  source 1..16: mol_type = genomic DNA
tccctgttcgggcgcc

SEQ ID NO: 66899 - DNA, 17 bp, Homo sapiens
  source 1..17: mol_type = genomic DNA
tccctgttcgggcgcca

SEQ ID NO: 66900 - DNA, 16 bp, Homo sapiens
  source 1..16: mol_type = genomic DNA
tcccttcgtggtcgcc

SEQ ID NO: 66901 - DNA, 17 bp, Homo sapiens
  source 1..17: mol_type = genomic DNA
tcccttcgtggtcgcca

SEQ ID NO: 66902 - DNA, 18 bp, Homo sapiens
  source 1..18: mol_type = genomic DNA
tccgaggtgattttcata

SEQ ID NO: 66903 - DNA, 20 bp, Homo sapiens
  source 1..20: mol_type = genomic DNA
tccgaggtgattttcatatt

SEQ ID NO: 66904 - DNA, 21 bp, Homo sapiens
  source 1..21: mol_type = genomic DNA
tccgaggtgattttcatattg

SEQ ID NO: 66905 - DNA, 16 bp, Homo sapiens
  source 1..16: mol_type = genomic DNA
tccgagtcacggcacc

SEQ ID NO: 66906 - DNA, 17 bp, Homo sapiens
  source 1..17: mol_type = genomic DNA
tccgagtcacggcacca

SEQ ID NO: 66907 - DNA, 17 bp, Homo sapiens
  source 1..17: mol_type = genomic DNA
tccggatggaggcgtgg

SEQ ID NO: 66908 - DNA, 18 bp, Homo sapiens
  source 1..18: mol_type = genomic DNA
tccggatggaggcgtggg

SEQ ID NO: 66909 - DNA, 19 bp, Homo sapiens
  source 1..19: mol_type = genomic DNA
tccggatggaggcgtgggt

SEQ ID NO: 66910 - DNA, 16 bp, Homo sapiens
  source 1..16: mol_type = genomic DNA
tccggctcgaaggacc

SEQ ID NO: 66911 - DNA, 17 bp, Homo sapiens
  source 1..17: mol_type = genomic DNA
tccggctcgaaggacca

SEQ ID NO: 66912 - DNA, 16 bp, Homo sapiens
  source 1..16: mol_type = genomic DNA
tccggctcggaggacc

SEQ ID NO: 66913 - DNA, 17 bp, Homo sapiens
  source 1..17: mol_type = genomic DNA
tccggctcggaggacca

SEQ ID NO: 66914 - DNA, 16 bp, Homo sapiens
  source 1..16: mol_type = genomic DNA
tccgggtgccccctcc

SEQ ID NO: 66915 - DNA, 17 bp, Homo sapiens
  source 1..17: mol_type = genomic DNA
tccgggtgccccctcca

SEQ ID NO: 66916 - DNA, 20 bp, Homo sapiens
  source 1..20: mol_type = genomic DNA
tccgggttcgagtcccggcg

SEQ ID NO: 66917 - DNA, 16 bp, Homo sapiens
  source 1..16: mol_type = genomic DNA
tccgtagtgtagtggt

SEQ ID NO: 66918 - DNA, 19 bp, Homo sapiens
  source 1..19: mol_type = genomic DNA
tccgtagtgtagtggttat

SEQ ID NO: 66919 - DNA, 20 bp, Homo sapiens
  source 1..20: mol_type = genomic DNA
tccgtagtgtagtggttatc

SEQ ID NO: 66920 - DNA, 21 bp, Homo sapiens
  source 1..21: mol_type = genomic DNA
tccgtagtgtagtggttatca

SEQ ID NO: 66921 - DNA, 16 bp, Homo sapiens
  source 1..16: mol_type = genomic DNA
tccgtgcgagaatacc

SEQ ID NO: 66922 - DNA, 17 bp, Homo sapiens
  source 1..17: mol_type = genomic DNA
tccgtgcgagaatacca

SEQ ID NO: 66923 - DNA, 16 bp, Homo sapiens
  source 1..16: mol_type = genomic DNA
tccgtggcgcaatgga

SEQ ID NO: 66924 - DNA, 17 bp, Homo sapiens
  source 1..17: mol_type = genomic DNA
tcctatatatcttacca

SEQ ID NO: 66925 - DNA, 18 bp, Homo sapiens
  source 1..18: mol_type = genomic DNA
tcctcacctggagcacca

SEQ ID NO: 66926 - DNA, 16 bp, Homo sapiens
  source 1..16: mol_type = genomic DNA
tcctcgttagtatagt

SEQ ID NO: 66927 - DNA, 17 bp, Homo sapiens
  source 1..17: mol_type = genomic DNA
tcctcgttagtatagtg

SEQ ID NO: 66928 - DNA, 18 bp, Homo sapiens
  source 1..18: mol_type = genomic DNA
tcctcgttagtatagtgg

SEQ ID NO: 66929 - DNA, 19 bp, Homo sapiens
  source 1..19: mol_type = genomic DNA
tcctcgttagtatagtggt

SEQ ID NO: 66930 - DNA, 20 bp, Homo sapiens
  source 1..20: mol_type = genomic DNA
tcctcgttagtatagtggtg

SEQ ID NO: 66931 - DNA, 21 bp, Homo sapiens
  source 1..21: mol_type = genomic DNA
tcctcgttagtatagtggtga

SEQ ID NO: 66932 - DNA, 22 bp, Homo sapiens
  source 1..22: mol_type = genomic DNA
tcctcgttagtatagtggtgag

SEQ ID NO: 66933 - DNA, 23 bp, Homo sapiens
  source 1..23: mol_type = genomic DNA
tcctcgttagtatagtggtgagt

SEQ ID NO: 66934 - DNA, 20 bp, Homo sapiens
  source 1..20: mol_type = genomic DNA
tcctcgttagtatagtggtt

SEQ ID NO: 66935 - DNA, 23 bp, Homo sapiens
  source 1..23: mol_type = genomic DNA
tcctcgttagtatagtggttagt

SEQ ID NO: 66936 - DNA, 16 bp, Homo sapiens
  source 1..16: mol_type = genomic DNA
tcctcttcttaacacc

SEQ ID NO: 66937 - DNA, 16 bp, Homo sapiens
  source 1..16: mol_type = genomic DNA
tcctgccgactacgcc

SEQ ID NO: 66938 - DNA, 17 bp, Homo sapiens
  source 1..17: mol_type = genomic DNA
tcctgccgactacgcca

SEQ ID NO: 66939 - DNA, 16 bp, Homo sapiens
  source 1..16: mol_type = genomic DNA
tcctgccgcggtcgcc

SEQ ID NO: 66940 - DNA, 17 bp, Homo sapiens
  source 1..17: mol_type = genomic DNA
tcctgccgcggtcgcca

SEQ ID NO: 66941 - DNA, 17 bp, Homo sapiens
  source 1..17: mol_type = genomic DNA
tcctgctcacagcgcca

SEQ ID NO: 66942 - DNA, 16 bp, Homo sapiens
  source 1..16: mol_type = genomic DNA
tcctggctggctcgcc

SEQ ID NO: 66943 - DNA, 17 bp, Homo sapiens
  source 1..17: mol_type = genomic DNA
tcctggctggctcgcca

SEQ ID NO: 66944 - DNA, 17 bp, Homo sapiens
  source 1..17: mol_type = genomic DNA
tcctgttcgtgacgcca

SEQ ID NO: 66945 - DNA, 17 bp, Homo sapiens
  source 1..17: mol_type = genomic DNA
tccttccttttttgcca

SEQ ID NO: 66946 - DNA, 18 bp, Homo sapiens
  source 1..18: mol_type = genomic DNA
tcgaaaccatcctctgct

SEQ ID NO: 66947 - DNA, 20 bp, Homo sapiens
  source 1..20: mol_type = genomic DNA
tcgaaaccatcctctgctac

SEQ ID NO: 66948 - DNA, 21 bp, Homo sapiens
  source 1..21: mol_type = genomic DNA
tcgaaaccatcctctgctacc

SEQ ID NO: 66949 - DNA, 22 bp, Homo sapiens
  source 1..22: mol_type = genomic DNA
tcgaaaccatcctctgctacca

SEQ ID NO: 66950 - DNA, 21 bp, Homo sapiens
  source 1..21: mol_type = genomic DNA
tcgaaaccgggcggaaacacc

SEQ ID NO: 66951 - DNA, 22 bp, Homo sapiens
  source 1..22: mol_type = genomic DNA
tcgaaaccgggcggaaacacca

SEQ ID NO: 66952 - DNA, 25 bp, Homo sapiens
  source 1..25: mol_type = genomic DNA
tcgaagaagcagcttcaaacctgcc

SEQ ID NO: 66953 - DNA, 21 bp, Homo sapiens
  source 1..21: mol_type = genomic DNA
tcgaatcacgtcggggtcacc

SEQ ID NO: 66954 - DNA, 22 bp, Homo sapiens
  source 1..22: mol_type = genomic DNA
tcgaatcacgtcggggtcacca

SEQ ID NO: 66955 - DNA, 21 bp, Homo sapiens
  source 1..21: mol_type = genomic DNA
tcgaatcccaccgctgccacc

SEQ ID NO: 66956 - DNA, 19 bp, Homo sapiens
  source 1..19: mol_type = genomic DNA
tcgaatcccactcctgaca

SEQ ID NO: 66957 - DNA, 20 bp, Homo sapiens
  source 1..20: mol_type = genomic DNA
tcgaatcccactcctgacac

SEQ ID NO: 66958 - DNA, 21 bp, Homo sapiens
  source 1..21: mol_type = genomic DNA
tcgaatcccactcctgacacc

SEQ ID NO: 66959 - DNA, 22 bp, Homo sapiens
  source 1..22: mol_type = genomic DNA
tcgaatcccactcctgacacca

SEQ ID NO: 66960 - DNA, 19 bp, Homo sapiens
  source 1..19: mol_type = genomic DNA
tcgaatcccacttctgaca

SEQ ID NO: 66961 - DNA, 21 bp, Homo sapiens
  source 1..21: mol_type = genomic DNA
tcgaatcccacttctgacacc

SEQ ID NO: 66962 - DNA, 20 bp, Homo sapiens
  source 1..20: mol_type = genomic DNA
tcgaatcccatcctcgtcgc

SEQ ID NO: 66963 - DNA, 21 bp, Homo sapiens
  source 1..21: mol_type = genomic DNA
tcgaatcccatcctcgtcgcc

SEQ ID NO: 66964 - DNA, 22 bp, Homo sapiens
  source 1..22: mol_type = genomic DNA
tcgaatcccatcctcgtcgcca

SEQ ID NO: 66965 - DNA, 18 bp, Homo sapiens
  source 1..18: mol_type = genomic DNA
tcgaatccgagtcacggc

SEQ ID NO: 66966 - DNA, 19 bp, Homo sapiens
  source 1..19: mol_type = genomic DNA
tcgaatccgagtcacggca

SEQ ID NO: 66967 - DNA, 20 bp, Homo sapiens
  source 1..20: mol_type = genomic DNA
tcgaatccgagtcacggcac

SEQ ID NO: 66968 - DNA, 21 bp, Homo sapiens
  source 1..21: mol_type = genomic DNA
tcgaatccgagtcacggcacc

SEQ ID NO: 66969 - DNA, 22 bp, Homo sapiens
  source 1..22: mol_type = genomic DNA
tcgaatccgagtcacggcacca

SEQ ID NO: 66970 - DNA, 22 bp, Homo sapiens
  source 1..22: mol_type = genomic DNA
tcgaatccggctcgaaggacca

SEQ ID NO: 66971 - DNA, 22 bp, Homo sapiens
  source 1..22: mol_type = genomic DNA
tcgaatcctgccgactacgcca

SEQ ID NO: 66972 - DNA, 19 bp, Homo sapiens
  source 1..19: mol_type = genomic DNA
tcgactcccggtgtgggaa

SEQ ID NO: 66973 - DNA, 20 bp, Homo sapiens
  source 1..20: mol_type = genomic DNA
tcgactcccggtgtgggaac

SEQ ID NO: 66974 - DNA, 21 bp, Homo sapiens
  source 1..21: mol_type = genomic DNA
tcgactcccggtgtgggaacc

SEQ ID NO: 66975 - DNA, 22 bp, Homo sapiens
  source 1..22: mol_type = genomic DNA
tcgactcccggtgtgggaacca

SEQ ID NO: 66976 - DNA, 21 bp, Homo sapiens
  source 1..21: mol_type = genomic DNA
tcgactcctggctggctcgcc

SEQ ID NO: 66977 - DNA, 20 bp, Homo sapiens
  source 1..20: mol_type = genomic DNA
tcgagcctcacctggagcac

SEQ ID NO: 66978 - DNA, 21 bp, Homo sapiens
  source 1..21: mol_type = genomic DNA
tcgagcctcacctggagcacc

SEQ ID NO: 66979 - DNA, 22 bp, Homo sapiens
  source 1..22: mol_type = genomic DNA
tcgagcctcacctggagcacca

SEQ ID NO: 66980 - DNA, 20 bp, Homo sapiens
  source 1..20: mol_type = genomic DNA
tcgattccccgacggggagc

SEQ ID NO: 66981 - DNA, 21 bp, Homo sapiens
  source 1..21: mol_type = genomic DNA
tcgattccccgacggggagcc

SEQ ID NO: 66982 - DNA, 22 bp, Homo sapiens
  source 1..22: mol_type = genomic DNA
tcgattccccgacggggagcca

SEQ ID NO: 66983 - DNA, 19 bp, Homo sapiens
  source 1..19: mol_type = genomic DNA
tcgattcccggccaacgca

SEQ ID NO: 66984 - DNA, 21 bp, Homo sapiens
  source 1..21: mol_type = genomic DNA
tcgattcccggccaacgcacc

SEQ ID NO: 66985 - DNA, 22 bp, Homo sapiens
  source 1..22: mol_type = genomic DNA
tcgattcccggccaacgcacca

SEQ ID NO: 66986 - DNA, 19 bp, Homo sapiens
  source 1..19: mol_type = genomic DNA
tcgattcccggccaatgca

SEQ ID NO: 66987 - DNA, 21 bp, Homo sapiens
  source 1..21: mol_type = genomic DNA
tcgattcccggccaatgcacc

SEQ ID NO: 66988 - DNA, 16 bp, Homo sapiens
  source 1..16: mol_type = genomic DNA
tcgattcccgggcggc

SEQ ID NO: 66989 - DNA, 22 bp, Homo sapiens
  source 1..22: mol_type = genomic DNA
tcgattcccgggcggcgcacca

SEQ ID NO: 66990 - DNA, 20 bp, Homo sapiens
  source 1..20: mol_type = genomic DNA
tcgattccggctcgaaggac

SEQ ID NO: 66991 - DNA, 21 bp, Homo sapiens
  source 1..21: mol_type = genomic DNA
tcgattccggctcgaaggacc

SEQ ID NO: 66992 - DNA, 22 bp, Homo sapiens
  source 1..22: mol_type = genomic DNA
tcgattccggctcgaaggacca

SEQ ID NO: 66993 - DNA, 20 bp, Homo sapiens
  source 1..20: mol_type = genomic DNA
tcgattctcatagtcctagc

SEQ ID NO: 66994 - DNA, 21 bp, Homo sapiens
  source 1..21: mol_type = genomic DNA
tcgattctcatagtcctagcc

SEQ ID NO: 66995 - DNA, 18 bp, Homo sapiens
  source 1..18: mol_type = genomic DNA
tcgcataaaacttaaaac

SEQ ID NO: 66996 - DNA, 20 bp, Homo sapiens
  source 1..20: mol_type = genomic DNA
tcgcgggttcgatccccgta

SEQ ID NO: 66997 - DNA, 19 bp, Homo sapiens
  source 1..19: mol_type = genomic DNA
tcgggcccataccccgaaa

SEQ ID NO: 66998 - DNA, 17 bp, Homo sapiens
  source 1..17: mol_type = genomic DNA
tcgggtgcgagaggtcc

SEQ ID NO: 66999 - DNA, 18 bp, Homo sapiens
  source 1..18: mol_type = genomic DNA
tcgggtgcgagaggtccc

SEQ ID NO: 67000 - DNA, 19 bp, Homo sapiens
  source 1..19: mol_type = genomic DNA
tcgggtgcgagaggtcccg

SEQ ID NO: 67001 - DNA, 20 bp, Homo sapiens
  source 1..20: mol_type = genomic DNA
tcgggtgcgagaggtcccgg

SEQ ID NO: 67002 - DNA, 16 bp, Homo sapiens
  source 1..16: mol_type = genomic DNA
tcggtagagcatgaga

SEQ ID NO: 67003 - DNA, 17 bp, Homo sapiens
  source 1..17: mol_type = genomic DNA
tcggtagagcatgagac

SEQ ID NO: 67004 - DNA, 19 bp, Homo sapiens
  source 1..19: mol_type = genomic DNA
tcggtagagcatgagactc

SEQ ID NO: 67005 - DNA, 20 bp, Homo sapiens
  source 1..20: mol_type = genomic DNA
tcggtagagcatgagactct

SEQ ID NO: 67006 - DNA, 21 bp, Homo sapiens
  source 1..21: mol_type = genomic DNA
tcggtagagcatgagactctt

SEQ ID NO: 67007 - DNA, 16 bp, Homo sapiens
  source 1..16: mol_type = genomic DNA
tcggtagagcatggga

SEQ ID NO: 67008 - DNA, 17 bp, Homo sapiens
  source 1..17: mol_type = genomic DNA
tcggtagagcatgggac

SEQ ID NO: 67009 - DNA, 18 bp, Homo sapiens
  source 1..18: mol_type = genomic DNA
tcggtagagcatgggact

SEQ ID NO: 67010 - DNA, 19 bp, Homo sapiens
  source 1..19: mol_type = genomic DNA
tcggtagagcatgggactc

SEQ ID NO: 67011 - DNA, 20 bp, Homo sapiens
  source 1..20: mol_type = genomic DNA
tcggtagagcatgggactct

SEQ ID NO: 67012 - DNA, 21 bp, Homo sapiens
  source 1..21: mol_type = genomic DNA
tcggtagagcatgggactctt

SEQ ID NO: 67013 - DNA, 18 bp, Homo sapiens
  source 1..18: mol_type = genomic DNA
tcgtatagtggttagtac

SEQ ID NO: 67014 - DNA, 21 bp, Homo sapiens
  source 1..21: mol_type = genomic DNA
tcgtatagtggttagtactct

SEQ ID NO: 67015 - DNA, 19 bp, Homo sapiens
  source 1..19: mol_type = genomic DNA
tcgtggttgtagtccgtgc

SEQ ID NO: 67016 - DNA, 20 bp, Homo sapiens
  source 1..20: mol_type = genomic DNA
tcgtggttgtagtccgtgcg

SEQ ID NO: 67017 - DNA, 18 bp, Homo sapiens
  source 1..18: mol_type = genomic DNA
tctaacaacatggctttc

SEQ ID NO: 67018 - DNA, 19 bp, Homo sapiens
  source 1..19: mol_type = genomic DNA
tctaacaacatggctttct

SEQ ID NO: 67019 - DNA, 21 bp, Homo sapiens
  source 1..21: mol_type = genomic DNA
tctaacaacatggctttctca

SEQ ID NO: 67020 - DNA, 23 bp, Homo sapiens
  source 1..23: mol_type = genomic DNA
tctaacaacatggctttctcacc

SEQ ID NO: 67021 - DNA, 24 bp, Homo sapiens
  source 1..24: mol_type = genomic DNA
tctaacaacatggctttctcacca

SEQ ID NO: 67022 - DNA, 16 bp, Homo sapiens
  source 1..16: mol_type = genomic DNA
tctaaggcgctggatt

SEQ ID NO: 67023 - DNA, 20 bp, Homo sapiens
  source 1..20: mol_type = genomic DNA
tctaggggtatgattctcgc

SEQ ID NO: 67024 - DNA, 20 bp, Homo sapiens
  source 1..20: mol_type = genomic DNA
tctagtggttaggattcggc

SEQ ID NO: 67025 - DNA, 22 bp, Homo sapiens
  source 1..22: mol_type = genomic DNA
tctagtggttaggattcggcgc

SEQ ID NO: 67026 - DNA, 18 bp, Homo sapiens
  source 1..18: mol_type = genomic DNA
tctcagggtcgtgggttc

SEQ ID NO: 67027 - DNA, 16 bp, Homo sapiens
  source 1..16: mol_type = genomic DNA
tctcatagtcctagcc

SEQ ID NO: 67028 - DNA, 17 bp, Homo sapiens
  source 1..17: mol_type = genomic DNA
tctcatagtcctagcca

SEQ ID NO: 67029 - DNA, 16 bp, Homo sapiens
  source 1..16: mol_type = genomic DNA
tctccggatggaggcg

SEQ ID NO: 67030 - DNA, 17 bp, Homo sapiens
  source 1..17: mol_type = genomic DNA
tctccggatggaggcgt

SEQ ID NO: 67031 - DNA, 19 bp, Homo sapiens
  source 1..19: mol_type = genomic DNA
tctccggatggaggcgtgg

SEQ ID NO: 67032 - DNA, 20 bp, Homo sapiens
  source 1..20: mol_type = genomic DNA
tctccggatggaggcgtggg

SEQ ID NO: 67033 - DNA, 21 bp, Homo sapiens
  source 1..21: mol_type = genomic DNA
tctccggatggaggcgtgggt

SEQ ID NO: 67034 - DNA, 22 bp, Homo sapiens
  source 1..22: mol_type = genomic DNA
tctccggatggaggcgtgggtt

SEQ ID NO: 67035 - DNA, 16 bp, Homo sapiens
  source 1..16: mol_type = genomic DNA
tctcgctggggcctcc

SEQ ID NO: 67036 - DNA, 17 bp, Homo sapiens
  source 1..17: mol_type = genomic DNA
tctcgctggggcctcca

SEQ ID NO: 67037 - DNA, 16 bp, Homo sapiens
  source 1..16: mol_type = genomic DNA
tctcggtggaacctcc

SEQ ID NO: 67038 - DNA, 17 bp, Homo sapiens
  source 1..17: mol_type = genomic DNA
tctcggtggaacctcca

SEQ ID NO: 67039 - DNA, 16 bp, Homo sapiens
  source 1..16: mol_type = genomic DNA
tctcggtgggacctcc

SEQ ID NO: 67040 - DNA, 17 bp, Homo sapiens
  source 1..17: mol_type = genomic DNA
tctcggtgggacctcca

SEQ ID NO: 67041 - DNA, 19 bp, Homo sapiens
  source 1..19: mol_type = genomic DNA
tctctgtggcgcaatggac

SEQ ID NO: 67042 - DNA, 16 bp, Homo sapiens
  source 1..16: mol_type = genomic DNA
tctcttcgggggcgtg

SEQ ID NO: 67043 - DNA, 17 bp, Homo sapiens
  source 1..17: mol_type = genomic DNA
tctcttcgggggcgtgg

SEQ ID NO: 67044 - DNA, 18 bp, Homo sapiens
  source 1..18: mol_type = genomic DNA
tctgaaggtcctgagttc

SEQ ID NO: 67045 - DNA, 18 bp, Homo sapiens
  source 1..18: mol_type = genomic DNA
tctgaaggtcgtgagttc

SEQ ID NO: 67046 - DNA, 19 bp, Homo sapiens
  source 1..19: mol_type = genomic DNA
tctgaaggtcgtgagttcg

SEQ ID NO: 67047 - DNA, 17 bp, Homo sapiens
  source 1..17: mol_type = genomic DNA
tctgacaacagaggctt

SEQ ID NO: 67048 - DNA, 19 bp, Homo sapiens
  source 1..19: mol_type = genomic DNA
tctgacaacagaggcttac

SEQ ID NO: 67049 - DNA, 19 bp, Homo sapiens
  source 1..19: mol_type = genomic DNA
tctgacttcggatcagaag

SEQ ID NO: 67050 - DNA, 20 bp, Homo sapiens
  source 1..20: mol_type = genomic DNA
tctgacttcggatcagaaga

SEQ ID NO: 67051 - DNA, 18 bp, Homo sapiens
  source 1..18: mol_type = genomic DNA
tctgagggtccagggttc

SEQ ID NO: 67052 - DNA, 19 bp, Homo sapiens
  source 1..19: mol_type = genomic DNA
tctgattccggatcagaag

SEQ ID NO: 67053 - DNA, 20 bp, Homo sapiens
  source 1..20: mol_type = genomic DNA
tctgattccggatcagaaga

SEQ ID NO: 67054 - DNA, 16 bp, Homo sapiens
  source 1..16: mol_type = genomic DNA
tctgcgttgtggccgc

SEQ ID NO: 67055 - DNA, 16 bp, Homo sapiens
  source 1..16: mol_type = genomic DNA
tctggactctgaatcc

SEQ ID NO: 67056 - DNA, 19 bp, Homo sapiens
  source 1..19: mol_type = genomic DNA
tctggactctgaatccagc

SEQ ID NO: 67057 - DNA, 16 bp, Homo sapiens
  source 1..16: mol_type = genomic DNA
tctgtggcgcaatgga

SEQ ID NO: 67058 - DNA, 17 bp, Homo sapiens
  source 1..17: mol_type = genomic DNA
tctgtggcgcaatggac

SEQ ID NO: 67059 - DNA, 17 bp, Homo sapiens
  source 1..17: mol_type = genomic DNA
tcttaatcccagggtcg

SEQ ID NO: 67060 - DNA, 18 bp, Homo sapiens
  source 1..18: mol_type = genomic DNA
tcttaatcccagggtcgt

SEQ ID NO: 67061 - DNA, 19 bp, Homo sapiens
  source 1..19: mol_type = genomic DNA
tcttaatcccagggtcgtg

SEQ ID NO: 67062 - DNA, 20 bp, Homo sapiens
  source 1..20: mol_type = genomic DNA
tcttaatcccagggtcgtgg

SEQ ID NO: 67063 - DNA, 19 bp, Homo sapiens
  source 1..19: mol_type = genomic DNA
tcttaatctcagggtcgtg

SEQ ID NO: 67064 - DNA, 16 bp, Homo sapiens
  source 1..16: mol_type = genomic DNA
tcttcgggggcgtggg

SEQ ID NO: 67065 - DNA, 17 bp, Homo sapiens
  source 1..17: mol_type = genomic DNA
tcttcgggggcgtgggt

SEQ ID NO: 67066 - DNA, 18 bp, Homo sapiens
  source 1..18: mol_type = genomic DNA
tcttcgggggcgtgggtt

SEQ ID NO: 67067 - DNA, 19 bp, Homo sapiens
  source 1..19: mol_type = genomic DNA
tcttcgggggcgtgggttt

SEQ ID NO: 67068 - DNA, 25 bp, Homo sapiens
  source 1..25: mol_type = genomic DNA
tgaaaacctttttccaaggacacca

SEQ ID NO: 67069 - DNA, 19 bp, Homo sapiens
  source 1..19: mol_type = genomic DNA
tgaaaatgtttagacgggc

SEQ ID NO: 67070 - DNA, 20 bp, Homo sapiens
  source 1..20: mol_type = genomic DNA
tgaaaatgtttagacgggct

SEQ ID NO: 67071 - DNA, 21 bp, Homo sapiens
  source 1..21: mol_type = genomic DNA
tgaaaatgtttagacgggctc

SEQ ID NO: 67072 - DNA, 22 bp, Homo sapiens
  source 1..22: mol_type = genomic DNA
tgaaaatgtttagacgggctca

SEQ ID NO: 67073 - DNA, 23 bp, Homo sapiens
  source 1..23: mol_type = genomic DNA
tgaaaatgtttagacgggctcac

SEQ ID NO: 67074 - DNA, 16 bp, Homo sapiens
  source 1..16: mol_type = genomic DNA
tgaagcattggactgt

SEQ ID NO: 67075 - DNA, 17 bp, Homo sapiens
  source 1..17: mol_type = genomic DNA
tgaagcattggactgta

SEQ ID NO: 67076 - DNA, 18 bp, Homo sapiens
  source 1..18: mol_type = genomic DNA
tgaatccagcgatccgag

SEQ ID NO: 67077 - DNA, 21 bp, Homo sapiens
  source 1..21: mol_type = genomic DNA
tgaatccagcgatccgagttc

SEQ ID NO: 67078 - DNA, 22 bp, Homo sapiens
  source 1..22: mol_type = genomic DNA
tgaatccagcgatccgagttca

SEQ ID NO: 67079 - DNA, 17 bp, Homo sapiens
  source 1..17: mol_type = genomic DNA
tgaatctgacaacagag

SEQ ID NO: 67080 - DNA, 18 bp, Homo sapiens
  source 1..18: mol_type = genomic DNA
tgaatctgacaacagagg

SEQ ID NO: 67081 - DNA, 19 bp, Homo sapiens
  source 1..19: mol_type = genomic DNA
tgaatctgacaacagaggc

SEQ ID NO: 67082 - DNA, 20 bp, Homo sapiens
  source 1..20: mol_type = genomic DNA
tgaatctgacaacagaggct

SEQ ID NO: 67083 - DNA, 21 bp, Homo sapiens
  source 1..21: mol_type = genomic DNA
tgaatctgacaacagaggctt

SEQ ID NO: 67084 - DNA, 24 bp, Homo sapiens
  source 1..24: mol_type = genomic DNA
tgaatctgacaacagaggcttacg

SEQ ID NO: 67085 - DNA, 25 bp, Homo sapiens
  source 1..25: mol_type = genomic DNA
tgaatctgacaacagaggcttacga

SEQ ID NO: 67086 - DNA, 17 bp, Homo sapiens
  source 1..17: mol_type = genomic DNA
tgacaacagaggcttac

SEQ ID NO: 67087 - DNA, 25 bp, Homo sapiens
  source 1..25: mol_type = genomic DNA
tgacaacattcaaaaaagagtacca

SEQ ID NO: 67088 - DNA, 18 bp, Homo sapiens
  source 1..18: mol_type = genomic DNA
tgacttcggatcagaaga

SEQ ID NO: 67089 - DNA, 17 bp, Homo sapiens
  source 1..17: mol_type = genomic DNA
tgagtgaagcattggac

SEQ ID NO: 67090 - DNA, 18 bp, Homo sapiens
  source 1..18: mol_type = genomic DNA
tgagtgaagcattggact

SEQ ID NO: 67091 - DNA, 20 bp, Homo sapiens
  source 1..20: mol_type = genomic DNA
tgagtgaagcattggactgt

SEQ ID NO: 67092 - DNA, 21 bp, Homo sapiens
  source 1..21: mol_type = genomic DNA
tgagtgaagcattggactgta

SEQ ID NO: 67093 - DNA, 20 bp, Homo sapiens
  source 1..20: mol_type = genomic DNA
tgataatcatatttaccaac

SEQ ID NO: 67094 - DNA, 21 bp, Homo sapiens
  source 1..21: mol_type = genomic DNA
tgataatcatatttaccaacc

SEQ ID NO: 67095 - DNA, 22 bp, Homo sapiens
  source 1..22: mol_type = genomic DNA
tgataatcatatttaccaacca

SEQ ID NO: 67096 - DNA, 20 bp, Homo sapiens
  source 1..20: mol_type = genomic DNA
tgatagagtaaataatagga

SEQ ID NO: 67097 - DNA, 18 bp, Homo sapiens
  source 1..18: mol_type = genomic DNA
tgattccggatcagaaga

SEQ ID NO: 67098 - DNA, 22 bp, Homo sapiens
  source 1..22: mol_type = genomic DNA
tgattctcgcttcgggtgcgag

SEQ ID NO: 67099 - DNA, 22 bp, Homo sapiens
  source 1..22: mol_type = genomic DNA
tgattctcgctttgggtgcgag

SEQ ID NO: 67100 - DNA, 23 bp, Homo sapiens
  source 1..23: mol_type = genomic DNA
tgattctcggtttgggtccgaga

SEQ ID NO: 67101 - DNA, 17 bp, Homo sapiens
  source 1..17: mol_type = genomic DNA
tgatttcgactcattaa

SEQ ID NO: 67102 - DNA, 18 bp, Homo sapiens
  source 1..18: mol_type = genomic DNA
tgatttcgactcattaaa

SEQ ID NO: 67103 - DNA, 19 bp, Homo sapiens
  source 1..19: mol_type = genomic DNA
tgatttcgactcattaaat

SEQ ID NO: 67104 - DNA, 20 bp, Homo sapiens
  source 1..20: mol_type = genomic DNA
tgatttcgactcattaaatt

SEQ ID NO: 67105 - DNA, 18 bp, Homo sapiens
  source 1..18: mol_type = genomic DNA
tgatttgcgttcagttga

SEQ ID NO: 67106 - DNA, 18 bp, Homo sapiens
  source 1..18: mol_type = genomic DNA
tgcaaattcgaagaagca

SEQ ID NO: 67107 - DNA, 19 bp, Homo sapiens
  source 1..19: mol_type = genomic DNA
tgcaaattcgaagaagcag

SEQ ID NO: 67108 - DNA, 20 bp, Homo sapiens
  source 1..20: mol_type = genomic DNA
tgcaaattcgaagaagcagc

SEQ ID NO: 67109 - DNA, 19 bp, Homo sapiens
  source 1..19: mol_type = genomic DNA
tgcaactccaaataaaagt

SEQ ID NO: 67110 - DNA, 20 bp, Homo sapiens
  source 1..20: mol_type = genomic DNA
tgcaactccaaataaaagta

SEQ ID NO: 67111 - DNA, 21 bp, Homo sapiens
  source 1..21: mol_type = genomic DNA
tgcaactccaaataaaagtac

SEQ ID NO: 67112 - DNA, 22 bp, Homo sapiens
  source 1..22: mol_type = genomic DNA
tgcaactccaaataaaagtacc

SEQ ID NO: 67113 - DNA, 23 bp, Homo sapiens
  source 1..23: mol_type = genomic DNA
tgcaactccaaataaaagtacca

SEQ ID NO: 67114 - DNA, 19 bp, Homo sapiens
  source 1..19: mol_type = genomic DNA
tgcaatacttaatttctgc

SEQ ID NO: 67115 - DNA, 20 bp, Homo sapiens
  source 1..20: mol_type = genomic DNA
tgcaatacttaatttctgcc

SEQ ID NO: 67116 - DNA, 21 bp, Homo sapiens
  source 1..21: mol_type = genomic DNA
tgcaatacttaatttctgcca

SEQ ID NO: 67117 - DNA, 16 bp, Homo sapiens
  source 1..16: mol_type = genomic DNA
tgcccccatgtctaac

SEQ ID NO: 67118 - DNA, 17 bp, Homo sapiens
  source 1..17: mol_type = genomic DNA
tgcccccatgtctaaca

SEQ ID NO: 67119 - DNA, 19 bp, Homo sapiens
  source 1..19: mol_type = genomic DNA
tgcccccatgtctaacaac

SEQ ID NO: 67120 - DNA, 20 bp, Homo sapiens
  source 1..20: mol_type = genomic DNA
tgcccccatgtctaacaaca

SEQ ID NO: 67121 - DNA, 23 bp, Homo sapiens
  source 1..23: mol_type = genomic DNA
tgcccccatgtctaacaacatgg

SEQ ID NO: 67122 - DNA, 24 bp, Homo sapiens
  source 1..24: mol_type = genomic DNA
tgcccccatgtctaacaacatggc

SEQ ID NO: 67123 - DNA, 25 bp, Homo sapiens
  source 1..25: mol_type = genomic DNA
tgcccccatgtctaacaacatggct

SEQ ID NO: 67124 - DNA, 18 bp, Homo sapiens
  source 1..18: mol_type = genomic DNA
tgcccgcatcctccacca

SEQ ID NO: 67125 - DNA, 17 bp, Homo sapiens
  source 1..17: mol_type = genomic DNA
tgccgtgatcgtatagt

SEQ ID NO: 67126 - DNA, 18 bp, Homo sapiens
  source 1..18: mol_type = genomic DNA
tgccgtgatcgtatagtg

SEQ ID NO: 67127 - DNA, 19 bp, Homo sapiens
  source 1..19: mol_type = genomic DNA
tgccgtgatcgtatagtgg

SEQ ID NO: 67128 - DNA, 20 bp, Homo sapiens
  source 1..20: mol_type = genomic DNA
tgccgtgatcgtatagtggt

SEQ ID NO: 67129 - DNA, 21 bp, Homo sapiens
  source 1..21: mol_type = genomic DNA
tgccgtgatcgtatagtggtt

SEQ ID NO: 67130 - DNA, 22 bp, Homo sapiens
  source 1..22: mol_type = genomic DNA
tgccgtgatcgtatagtggtta

SEQ ID NO: 67131 - DNA, 23 bp, Homo sapiens
  source 1..23: mol_type = genomic DNA
tgccgtgatcgtatagtggttag

SEQ ID NO: 67132 - DNA, 24 bp, Homo sapiens
  source 1..24: mol_type = genomic DNA
tgccgtgatcgtatagtggttagt

SEQ ID NO: 67133 - DNA, 16 bp, Homo sapiens
  source 1..16: mol_type = genomic DNA
tgctaatccattgtgc

SEQ ID NO: 67134 - DNA, 17 bp, Homo sapiens
  source 1..17: mol_type = genomic DNA
tgctaatccattgtgct

SEQ ID NO: 67135 - DNA, 21 bp, Homo sapiens
  source 1..21: mol_type = genomic DNA
tgctaatccattgtgctttgc

SEQ ID NO: 67136 - DNA, 22 bp, Homo sapiens
  source 1..22: mol_type = genomic DNA
tgctaatccattgtgctttgca

SEQ ID NO: 67137 - DNA, 21 bp, Homo sapiens
  source 1..21: mol_type = genomic DNA
tggacatatgtccgcgtgggt

SEQ ID NO: 67138 - DNA, 17 bp, Homo sapiens
  source 1..17: mol_type = genomic DNA
tggactctgaatccagc

SEQ ID NO: 67139 - DNA, 17 bp, Homo sapiens
  source 1..17: mol_type = genomic DNA
tggactttgaatccagc

SEQ ID NO: 67140 - DNA, 16 bp, Homo sapiens
  source 1..16: mol_type = genomic DNA
tggaggcgtgggttcg

SEQ ID NO: 67141 - DNA, 22 bp, Homo sapiens
  source 1..22: mol_type = genomic DNA
tggaggcgtgggttcgaatccc

SEQ ID NO: 67142 - DNA, 16 bp, Homo sapiens
  source 1..16: mol_type = genomic DNA
tggagttaaagacttt

SEQ ID NO: 67143 - DNA, 17 bp, Homo sapiens
  source 1..17: mol_type = genomic DNA
tggagttaaagactttt

SEQ ID NO: 67144 - DNA, 19 bp, Homo sapiens
  source 1..19: mol_type = genomic DNA
tggagttaaagactttttc

SEQ ID NO: 67145 - DNA, 20 bp, Homo sapiens
  source 1..20: mol_type = genomic DNA
tggagttaaagactttttct

SEQ ID NO: 67146 - DNA, 21 bp, Homo sapiens
  source 1..21: mol_type = genomic DNA
tggagttaaagactttttctc

SEQ ID NO: 67147 - DNA, 24 bp, Homo sapiens
  source 1..24: mol_type = genomic DNA
tggagttaaagactttttctctga

SEQ ID NO: 67148 - DNA, 25 bp, Homo sapiens
  source 1..25: mol_type = genomic DNA
tggagttaaagactttttctctgac

SEQ ID NO: 67149 - DNA, 17 bp, Homo sapiens
  source 1..17: mol_type = genomic DNA
tggccgagcggtctaag

SEQ ID NO: 67150 - DNA, 16 bp, Homo sapiens
  source 1..16: mol_type = genomic DNA
tggccgagtggttaag

SEQ ID NO: 67151 - DNA, 21 bp, Homo sapiens
  source 1..21: mol_type = genomic DNA
tggccgcagcaacctcggttc

SEQ ID NO: 67152 - DNA, 22 bp, Homo sapiens
  source 1..22: mol_type = genomic DNA
tggccgcagcaacctcggttcg

SEQ ID NO: 67153 - DNA, 23 bp, Homo sapiens
  source 1..23: mol_type = genomic DNA
tggccgcagcaacctcggttcga

SEQ ID NO: 67154 - DNA, 18 bp, Homo sapiens
  source 1..18: mol_type = genomic DNA
tggctgagtgaagcattg

SEQ ID NO: 67155 - DNA, 21 bp, Homo sapiens
  source 1..21: mol_type = genomic DNA
tggctgagtgaagcattggac

SEQ ID NO: 67156 - DNA, 16 bp, Homo sapiens
  source 1..16: mol_type = genomic DNA
tggggattgtgggttc

SEQ ID NO: 67157 - DNA, 17 bp, Homo sapiens
  source 1..17: mol_type = genomic DNA
tggggattgtgggttcg

SEQ ID NO: 67158 - DNA, 23 bp, Homo sapiens
  source 1..23: mol_type = genomic DNA
tggggattgtgggttcgagtccc

SEQ ID NO: 67159 - DNA, 20 bp, Homo sapiens
  source 1..20: mol_type = genomic DNA
tggggggttcgattccttcc

SEQ ID NO: 67160 - DNA, 16 bp, Homo sapiens
  source 1..16: mol_type = genomic DNA
tggggttttgcagtcc

SEQ ID NO: 67161 - DNA, 21 bp, Homo sapiens
  source 1..21: mol_type = genomic DNA
tggggttttgcagtccttacc

SEQ ID NO: 67162 - DNA, 22 bp, Homo sapiens
  source 1..22: mol_type = genomic DNA
tggggttttgcagtccttacca

SEQ ID NO: 67163 - DNA, 20 bp, Homo sapiens
  source 1..20: mol_type = genomic DNA
tgggtggttcagtggtagaa

SEQ ID NO: 67164 - DNA, 23 bp, Homo sapiens
  source 1..23: mol_type = genomic DNA
tgggtggttcagtggtagaattc

SEQ ID NO: 67165 - DNA, 24 bp, Homo sapiens
  source 1..24: mol_type = genomic DNA
tgggtggttcagtggtagaattct

SEQ ID NO: 67166 - DNA, 17 bp, Homo sapiens
  source 1..17: mol_type = genomic DNA
tgggttcgaatcccagc

SEQ ID NO: 67167 - DNA, 17 bp, Homo sapiens
  source 1..17: mol_type = genomic DNA
tgggttcgagccccacg

SEQ ID NO: 67168 - DNA, 22 bp, Homo sapiens
  source 1..22: mol_type = genomic DNA
tgggttcgagccccacgttggg

SEQ ID NO: 67169 - DNA, 23 bp, Homo sapiens
  source 1..23: mol_type = genomic DNA
tgggttcgagccccacgttgggc

SEQ ID NO: 67170 - DNA, 25 bp, Homo sapiens
  source 1..25: mol_type = genomic DNA
tgggttcgagccccacgttgggcgc

SEQ ID NO: 67171 - DNA, 22 bp, Homo sapiens
  source 1..22: mol_type = genomic DNA
tgggttcgagccccagtggaac

SEQ ID NO: 67172 - DNA, 25 bp, Homo sapiens
  source 1..25: mol_type = genomic DNA
tgggtttaagtcccattggtctagc

SEQ ID NO: 67173 - DNA, 16 bp, Homo sapiens
  source 1..16: mol_type = genomic DNA
tggtagaattctcgcc

SEQ ID NO: 67174 - DNA, 17 bp, Homo sapiens
  source 1..17: mol_type = genomic DNA
tggtagaattctcgcct

SEQ ID NO: 67175 - DNA, 19 bp, Homo sapiens
  source 1..19: mol_type = genomic DNA
tggtagaattctcgcctgc

SEQ ID NO: 67176 - DNA, 20 bp, Homo sapiens
  source 1..20: mol_type = genomic DNA
tggtagaattctcgcctgcc

SEQ ID NO: 67177 - DNA, 21 bp, Homo sapiens
  source 1..21: mol_type = genomic DNA
tggtagaattctcgcctgcca

SEQ ID NO: 67178 - DNA, 22 bp, Homo sapiens
  source 1..22: mol_type = genomic DNA
tggtagaattctcgcctgccac

SEQ ID NO: 67179 - DNA, 16 bp, Homo sapiens
  source 1..16: mol_type = genomic DNA
tggtatatagtttaaa

SEQ ID NO: 67180 - DNA, 17 bp, Homo sapiens
  source 1..17: mol_type = genomic DNA
tggtatatagtttaaac

SEQ ID NO: 67181 - DNA, 16 bp, Homo sapiens
  source 1..16: mol_type = genomic DNA
tggtcgtggttgtagt

SEQ ID NO: 67182 - DNA, 17 bp, Homo sapiens
  source 1..17: mol_type = genomic DNA
tggtcgtggttgtagtc

SEQ ID NO: 67183 - DNA, 18 bp, Homo sapiens
  source 1..18: mol_type = genomic DNA
tggtcgtggttgtagtcc

SEQ ID NO: 67184 - DNA, 19 bp, Homo sapiens
  source 1..19: mol_type = genomic DNA
tggtcgtggttgtagtccg

SEQ ID NO: 67185 - DNA, 20 bp, Homo sapiens
  source 1..20: mol_type = genomic DNA
tggtcgtggttgtagtccgt

SEQ ID NO: 67186 - DNA, 22 bp, Homo sapiens
  source 1..22: mol_type = genomic DNA
tggtcgtggttgtagtccgtgc

SEQ ID NO: 67187 - DNA, 23 bp, Homo sapiens
  source 1..23: mol_type = genomic DNA
tggtcgtggttgtagtccgtgcg

SEQ ID NO: 67188 - DNA, 17 bp, Homo sapiens
  source 1..17: mol_type = genomic DNA
tggtctaaggcgccaga

SEQ ID NO: 67189 - DNA, 17 bp, Homo sapiens
  source 1..17: mol_type = genomic DNA
tggtctaaggcgctgga

SEQ ID NO: 67190 - DNA, 18 bp, Homo sapiens
  source 1..18: mol_type = genomic DNA
tggtctagtggttaggat

SEQ ID NO: 67191 - DNA, 20 bp, Homo sapiens
  source 1..20: mol_type = genomic DNA
tggtctagtggttaggattc

SEQ ID NO: 67192 - DNA, 23 bp, Homo sapiens
  source 1..23: mol_type = genomic DNA
tggtctagtggttaggattcggc

SEQ ID NO: 67193 - DNA, 18 bp, Homo sapiens
  source 1..18: mol_type = genomic DNA
tggtctccggatggaggc

SEQ ID NO: 67194 - DNA, 16 bp, Homo sapiens
  source 1..16: mol_type = genomic DNA
tggtgagtatccccgc

SEQ ID NO: 67195 - DNA, 17 bp, Homo sapiens
  source 1..17: mol_type = genomic DNA
tggtgcaactccaaata

SEQ ID NO: 67196 - DNA, 23 bp, Homo sapiens
  source 1..23: mol_type = genomic DNA
tggtgcaactccaaataaaagta

SEQ ID NO: 67197 - DNA, 25 bp, Homo sapiens
  source 1..25: mol_type = genomic DNA
tggtgcaactccaaataaaagtacc

SEQ ID NO: 67198 - DNA, 16 bp, Homo sapiens
  source 1..16: mol_type = genomic DNA
tggtggagttaaagac

SEQ ID NO: 67199 - DNA, 17 bp, Homo sapiens
  source 1..17: mol_type = genomic DNA
tggtggagttaaagact

SEQ ID NO: 67200 - DNA, 18 bp, Homo sapiens
  source 1..18: mol_type = genomic DNA
tggtggagttaaagactt

SEQ ID NO: 67201 - DNA, 19 bp, Homo sapiens
  source 1..19: mol_type = genomic DNA
tggtggagttaaagacttt

SEQ ID NO: 67202 - DNA, 20 bp, Homo sapiens
  source 1..20: mol_type = genomic DNA
tggtggagttaaagactttt

SEQ ID NO: 67203 - DNA, 20 bp, Homo sapiens
  source 1..20: mol_type = genomic DNA
tggtggtctagtggttagga

SEQ ID NO: 67204 - DNA, 21 bp, Homo sapiens
  source 1..21: mol_type = genomic DNA
tggtggtctagtggttaggat

SEQ ID NO: 67205 - DNA, 23 bp, Homo sapiens
  source 1..23: mol_type = genomic DNA
tggtggtctagtggttaggattc

SEQ ID NO: 67206 - DNA, 24 bp, Homo sapiens
  source 1..24: mol_type = genomic DNA
tggtggtctagtggttaggattcg

SEQ ID NO: 67207 - DNA, 25 bp, Homo sapiens
  source 1..25: mol_type = genomic DNA
tggtggtctagtggttaggattcgg

SEQ ID NO: 67208 - DNA, 19 bp, Homo sapiens
  source 1..19: mol_type = genomic DNA
tggtggttcagtggtagaa

SEQ ID NO: 67209 - DNA, 22 bp, Homo sapiens
  source 1..22: mol_type = genomic DNA
tggtggttcagtggtagaattc

SEQ ID NO: 67210 - DNA, 23 bp, Homo sapiens
  source 1..23: mol_type = genomic DNA
tggtggttcagtggtagaattct

SEQ ID NO: 67211 - DNA, 24 bp, Homo sapiens
  source 1..24: mol_type = genomic DNA
tggtggttcagtggtagaattctc

SEQ ID NO: 67212 - DNA, 16 bp, Homo sapiens
  source 1..16: mol_type = genomic DNA
tggtgtaatggttagc

SEQ ID NO: 67213 - DNA, 19 bp, Homo sapiens
  source 1..19: mol_type = genomic DNA
tggtgtagtggtatcatgc

SEQ ID NO: 67214 - DNA, 20 bp, Homo sapiens
  source 1..20: mol_type = genomic DNA
tggtgtagtggtatcatgca

SEQ ID NO: 67215 - DNA, 23 bp, Homo sapiens
  source 1..23: mol_type = genomic DNA
tggtgtagtggtatcatgcaaga

SEQ ID NO: 67216 - DNA, 16 bp, Homo sapiens
  source 1..16: mol_type = genomic DNA
tggttagcactctgga

SEQ ID NO: 67217 - DNA, 18 bp, Homo sapiens
  source 1..18: mol_type = genomic DNA
tggttagcactctggact

SEQ ID NO: 67218 - DNA, 19 bp, Homo sapiens
  source 1..19: mol_type = genomic DNA
tggttagcactctggactc

SEQ ID NO: 67219 - DNA, 20 bp, Homo sapiens
  source 1..20: mol_type = genomic DNA
tggttagcactctggactct

SEQ ID NO: 67220 - DNA, 21 bp, Homo sapiens
  source 1..21: mol_type = genomic DNA
tggttagcactctggactctg

SEQ ID NO: 67221 - DNA, 16 bp, Homo sapiens
  source 1..16: mol_type = genomic DNA
tggttaggattcggcg

SEQ ID NO: 67222 - DNA, 17 bp, Homo sapiens
  source 1..17: mol_type = genomic DNA
tggttaggattcggcgc

SEQ ID NO: 67223 - DNA, 18 bp, Homo sapiens
  source 1..18: mol_type = genomic DNA
tggttaggattcggcgct

SEQ ID NO: 67224 - DNA, 19 bp, Homo sapiens
  source 1..19: mol_type = genomic DNA
tggttaggattcggcgctc

SEQ ID NO: 67225 - DNA, 20 bp, Homo sapiens
  source 1..20: mol_type = genomic DNA
tggttaggattcggcgctct

SEQ ID NO: 67226 - DNA, 21 bp, Homo sapiens
  source 1..21: mol_type = genomic DNA
tggttaggattcggcgctctc

SEQ ID NO: 67227 - DNA, 22 bp, Homo sapiens
  source 1..22: mol_type = genomic DNA
tggttaggattcggcgctctca

SEQ ID NO: 67228 - DNA, 23 bp, Homo sapiens
  source 1..23: mol_type = genomic DNA
tggttaggattcggcgctctcac

SEQ ID NO: 67229 - DNA, 16 bp, Homo sapiens
  source 1..16: mol_type = genomic DNA
tggttagtactctgcg

SEQ ID NO: 67230 - DNA, 18 bp, Homo sapiens
  source 1..18: mol_type = genomic DNA
tggttagtactctgcgtt

SEQ ID NO: 67231 - DNA, 19 bp, Homo sapiens
  source 1..19: mol_type = genomic DNA
tggttagtactctgcgttg

SEQ ID NO: 67232 - DNA, 20 bp, Homo sapiens
  source 1..20: mol_type = genomic DNA
tggttagtactctgcgttgt

SEQ ID NO: 67233 - DNA, 24 bp, Homo sapiens
  source 1..24: mol_type = genomic DNA
tggttatacccttcccgtactacc

SEQ ID NO: 67234 - DNA, 16 bp, Homo sapiens
  source 1..16: mol_type = genomic DNA
tggttatcacgttcgc

SEQ ID NO: 67235 - DNA, 16 bp, Homo sapiens
  source 1..16: mol_type = genomic DNA
tggttcagtggtagaa

SEQ ID NO: 67236 - DNA, 17 bp, Homo sapiens
  source 1..17: mol_type = genomic DNA
tggttcagtggtagaat

SEQ ID NO: 67237 - DNA, 19 bp, Homo sapiens
  source 1..19: mol_type = genomic DNA
tggttcagtggtagaattc

SEQ ID NO: 67238 - DNA, 20 bp, Homo sapiens
  source 1..20: mol_type = genomic DNA
tggttcagtggtagaattct

SEQ ID NO: 67239 - DNA, 21 bp, Homo sapiens
  source 1..21: mol_type = genomic DNA
tggttcagtggtagaattctc

SEQ ID NO: 67240 - DNA, 23 bp, Homo sapiens
  source 1..23: mol_type = genomic DNA
tggttcagtggtagaattctcgc

SEQ ID NO: 67241 - DNA, 24 bp, Homo sapiens
  source 1..24: mol_type = genomic DNA
tggttcagtggtagaattctcgcc

SEQ ID NO: 67242 - DNA, 16 bp, Homo sapiens
  source 1..16: mol_type = genomic DNA
tggttgtagtccgtgc

SEQ ID NO: 67243 - DNA, 17 bp, Homo sapiens
  source 1..17: mol_type = genomic DNA
tggttgtagtccgtgcg

SEQ ID NO: 67244 - DNA, 18 bp, Homo sapiens
  source 1..18: mol_type = genomic DNA
tggttgtagtccgtgcga

SEQ ID NO: 67245 - DNA, 19 bp, Homo sapiens
  source 1..19: mol_type = genomic DNA
tggttgtagtccgtgcgag

SEQ ID NO: 67246 - DNA, 20 bp, Homo sapiens
  source 1..20: mol_type = genomic DNA
tggttgtagtccgtgcgaga

SEQ ID NO: 67247 - DNA, 21 bp, Homo sapiens
  source 1..21: mol_type = genomic DNA
tggttgtagtccgtgcgagaa

SEQ ID NO: 67248 - DNA, 22 bp, Homo sapiens
  source 1..22: mol_type = genomic DNA
tggttgtagtccgtgcgagaat

SEQ ID NO: 67249 - DNA, 23 bp, Homo sapiens
  source 1..23: mol_type = genomic DNA
tggttgtagtccgtgcgagaata

SEQ ID NO: 67250 - DNA, 24 bp, Homo sapiens
  source 1..24: mol_type = genomic DNA
tggttgtagtccgtgcgagaatac

SEQ ID NO: 67251 - DNA, 25 bp, Homo sapiens
  source 1..25: mol_type = genomic DNA
tggttgtagtccgtgcgagaatacc

SEQ ID NO: 67252 - DNA, 19 bp, Homo sapiens
  source 1..19: mol_type = genomic DNA
tgtaaaccggagatgaaaa

SEQ ID NO: 67253 - DNA, 20 bp, Homo sapiens
  source 1..20: mol_type = genomic DNA
tgtaaaccggagatgaaaac

SEQ ID NO: 67254 - DNA, 21 bp, Homo sapiens
  source 1..21: mol_type = genomic DNA
tgtaaaccggagatgaaaacc

SEQ ID NO: 67255 - DNA, 20 bp, Homo sapiens
  source 1..20: mol_type = genomic DNA
tgtaatggttagcactctgg

SEQ ID NO: 67256 - DNA, 19 bp, Homo sapiens
  source 1..19: mol_type = genomic DNA
tgtagctcagtggtagagc

SEQ ID NO: 67257 - DNA, 19 bp, Homo sapiens
  source 1..19: mol_type = genomic DNA
tgtagtccgtgcgagaata

SEQ ID NO: 67258 - DNA, 20 bp, Homo sapiens
  source 1..20: mol_type = genomic DNA
tgtagtccgtgcgagaatac

SEQ ID NO: 67259 - DNA, 21 bp, Homo sapiens
  source 1..21: mol_type = genomic DNA
tgtagtccgtgcgagaatacc

SEQ ID NO: 67260 - DNA, 22 bp, Homo sapiens
  source 1..22: mol_type = genomic DNA
tgtagtccgtgcgagaatacca

SEQ ID NO: 67261 - DNA, 17 bp, Homo sapiens
  source 1..17: mol_type = genomic DNA
tgtctaacaacatggct

SEQ ID NO: 67262 - DNA, 25 bp, Homo sapiens
  source 1..25: mol_type = genomic DNA
tgtctaacaacatggctttctcacc

SEQ ID NO: 67263 - DNA, 16 bp, Homo sapiens
  source 1..16: mol_type = genomic DNA
tgtgaatctgacaaca

SEQ ID NO: 67264 - DNA, 17 bp, Homo sapiens
  source 1..17: mol_type = genomic DNA
tgtgaatctgacaacag

SEQ ID NO: 67265 - DNA, 18 bp, Homo sapiens
  source 1..18: mol_type = genomic DNA
tgtgaatctgacaacaga

SEQ ID NO: 67266 - DNA, 19 bp, Homo sapiens
  source 1..19: mol_type = genomic DNA
tgtgaatctgacaacagag

SEQ ID NO: 67267 - DNA, 20 bp, Homo sapiens
  source 1..20: mol_type = genomic DNA
tgtgctttgcacgcgtgggt

SEQ ID NO: 67268 - DNA, 19 bp, Homo sapiens
  source 1..19: mol_type = genomic DNA
tgtgggttcgagtcccatc

SEQ ID NO: 67269 - DNA, 19 bp, Homo sapiens
  source 1..19: mol_type = genomic DNA
tgtgggtttaagtcccatt

SEQ ID NO: 67270 - DNA, 16 bp, Homo sapiens
  source 1..16: mol_type = genomic DNA
tgtttagacgggctca

SEQ ID NO: 67271 - DNA, 17 bp, Homo sapiens
  source 1..17: mol_type = genomic DNA
tgtttagacgggctcac

SEQ ID NO: 67272 - DNA, 18 bp, Homo sapiens
  source 1..18: mol_type = genomic DNA
tgtttagacgggctcaca

SEQ ID NO: 67273 - DNA, 19 bp, Homo sapiens
  source 1..19: mol_type = genomic DNA
tgtttagacgggctcacat

SEQ ID NO: 67274 - DNA, 20 bp, Homo sapiens
  source 1..20: mol_type = genomic DNA
tgtttagacgggctcacatc

SEQ ID NO: 67275 - DNA, 21 bp, Homo sapiens
  source 1..21: mol_type = genomic DNA
tgtttagacgggctcacatca

SEQ ID NO: 67276 - DNA, 22 bp, Homo sapiens
  source 1..22: mol_type = genomic DNA
tgtttagacgggctcacatcac

SEQ ID NO: 67277 - DNA, 23 bp, Homo sapiens
  source 1..23: mol_type = genomic DNA
tgtttagacgggctcacatcacc

SEQ ID NO: 67278 - DNA, 24 bp, Homo sapiens
  source 1..24: mol_type = genomic DNA
tgtttagacgggctcacatcaccc

SEQ ID NO: 67279 - DNA, 20 bp, Homo sapiens
  source 1..20: mol_type = genomic DNA
tgtttgtgggtttaagtccc

SEQ ID NO: 67280 - DNA, 21 bp, Homo sapiens
  source 1..21: mol_type = genomic DNA
tgtttgtgggtttaagtccca

SEQ ID NO: 67281 - DNA, 23 bp, Homo sapiens
  source 1..23: mol_type = genomic DNA
tgtttgtgggtttaagtcccatt

SEQ ID NO: 67282 - DNA, 18 bp, Homo sapiens
  source 1..18: mol_type = genomic DNA
ttaaacccccttatttct

SEQ ID NO: 67283 - DNA, 19 bp, Homo sapiens
  source 1..19: mol_type = genomic DNA
ttaaacccccttatttcta

SEQ ID NO: 67284 - DNA, 20 bp, Homo sapiens
  source 1..20: mol_type = genomic DNA
ttaaacccccttatttctac

SEQ ID NO: 67285 - DNA, 21 bp, Homo sapiens
  source 1..21: mol_type = genomic DNA
ttaaacccccttatttctacc

SEQ ID NO: 67286 - DNA, 22 bp, Homo sapiens
  source 1..22: mol_type = genomic DNA
ttaaacccccttatttctacca

SEQ ID NO: 67287 - DNA, 19 bp, Homo sapiens
  source 1..19: mol_type = genomic DNA
ttaaagactttttctctga

SEQ ID NO: 67288 - DNA, 20 bp, Homo sapiens
  source 1..20: mol_type = genomic DNA
ttaaagactttttctctgac

SEQ ID NO: 67289 - DNA, 21 bp, Homo sapiens
  source 1..21: mol_type = genomic DNA
ttaaagactttttctctgacc

SEQ ID NO: 67290 - DNA, 22 bp, Homo sapiens
  source 1..22: mol_type = genomic DNA
ttaaagactttttctctgacca

SEQ ID NO: 67291 - DNA, 17 bp, Homo sapiens
  source 1..17: mol_type = genomic DNA
ttaaagattaagagaac

SEQ ID NO: 67292 - DNA, 18 bp, Homo sapiens
  source 1..18: mol_type = genomic DNA
ttaaagattaagagaacc

SEQ ID NO: 67293 - DNA, 19 bp, Homo sapiens
  source 1..19: mol_type = genomic DNA
ttaaagattaagagaacca

SEQ ID NO: 67294 - DNA, 20 bp, Homo sapiens
  source 1..20: mol_type = genomic DNA
ttaaagattaagagaaccaa

SEQ ID NO: 67295 - DNA, 21 bp, Homo sapiens
  source 1..21: mol_type = genomic DNA
ttaaagattaagagaaccaac

SEQ ID NO: 67296 - DNA, 18 bp, Homo sapiens
  source 1..18: mol_type = genomic DNA
ttaaagtggctgatttgc

SEQ ID NO: 67297 - DNA, 19 bp, Homo sapiens
  source 1..19: mol_type = genomic DNA
ttaaatacagaccaagagc

SEQ ID NO: 67298 - DNA, 24 bp, Homo sapiens
  source 1..24: mol_type = genomic DNA
ttaaattataggctaaatcctata

SEQ ID NO: 67299 - DNA, 22 bp, Homo sapiens
  source 1..22: mol_type = genomic DNA
ttaaattatgataatcatattt

SEQ ID NO: 67300 - DNA, 25 bp, Homo sapiens
  source 1..25: mol_type = genomic DNA
ttaaattatgataatcatatttacc

SEQ ID NO: 67301 - DNA, 17 bp, Homo sapiens
  source 1..17: mol_type = genomic DNA
ttaacacaaagcaccca

SEQ ID NO: 67302 - DNA, 17 bp, Homo sapiens
  source 1..17: mol_type = genomic DNA
ttaaccaaaacatcaga

SEQ ID NO: 67303 - DNA, 20 bp, Homo sapiens
  source 1..20: mol_type = genomic DNA
ttaactaagtgtttgtgggt

SEQ ID NO: 67304 - DNA, 21 bp, Homo sapiens
  source 1..21: mol_type = genomic DNA
ttaactaagtgtttgtgggtt

SEQ ID NO: 67305 - DNA, 22 bp, Homo sapiens
  source 1..22: mol_type = genomic DNA
ttaactaagtgtttgtgggttt

SEQ ID NO: 67306 - DNA, 17 bp, Homo sapiens
  source 1..17: mol_type = genomic DNA
ttaactagttttgacaa

SEQ ID NO: 67307 - DNA, 18 bp, Homo sapiens
  source 1..18: mol_type = genomic DNA
ttaactagttttgacaac

SEQ ID NO: 67308 - DNA, 16 bp, Homo sapiens
  source 1..16: mol_type = genomic DNA
ttaacttgaccgctct

SEQ ID NO: 67309 - DNA, 17 bp, Homo sapiens
  source 1..17: mol_type = genomic DNA
ttaacttgaccgctctg

SEQ ID NO: 67310 - DNA, 18 bp, Homo sapiens
  source 1..18: mol_type = genomic DNA
ttaacttgaccgctctga

SEQ ID NO: 67311 - DNA, 19 bp, Homo sapiens
  source 1..19: mol_type = genomic DNA
ttaacttgaccgctctgac

SEQ ID NO: 67312 - DNA, 20 bp, Homo sapiens
  source 1..20: mol_type = genomic DNA
ttaacttgaccgctctgacc

SEQ ID NO: 67313 - DNA, 21 bp, Homo sapiens
  source 1..21: mol_type = genomic DNA
ttaacttgaccgctctgacca

SEQ ID NO: 67314 - DNA, 21 bp, Homo sapiens
  source 1..21: mol_type = genomic DNA
ttaagtcccattggtctagcc

SEQ ID NO: 67315 - DNA, 17 bp, Homo sapiens
  source 1..17: mol_type = genomic DNA
ttaagttaaagattaag

SEQ ID NO: 67316 - DNA, 18 bp, Homo sapiens
  source 1..18: mol_type = genomic DNA
ttaagttaaagattaaga

SEQ ID NO: 67317 - DNA, 20 bp, Homo sapiens
  source 1..20: mol_type = genomic DNA
ttaagttaaagattaagaga

SEQ ID NO: 67318 - DNA, 23 bp, Homo sapiens
  source 1..23: mol_type = genomic DNA
ttaagttaaagattaagagaacc

SEQ ID NO: 67319 - DNA, 16 bp, Homo sapiens
  source 1..16: mol_type = genomic DNA
ttacacttaggagatt

SEQ ID NO: 67320 - DNA, 18 bp, Homo sapiens
  source 1..18: mol_type = genomic DNA
ttacacttaggagatttc

SEQ ID NO: 67321 - DNA, 19 bp, Homo sapiens
  source 1..19: mol_type = genomic DNA
ttacacttaggagatttca

SEQ ID NO: 67322 - DNA, 20 bp, Homo sapiens
  source 1..20: mol_type = genomic DNA
ttacacttaggagatttcaa

SEQ ID NO: 67323 - DNA, 21 bp, Homo sapiens
  source 1..21: mol_type = genomic DNA
ttacacttaggagatttcaac

SEQ ID NO: 67324 - DNA, 22 bp, Homo sapiens
  source 1..22: mol_type = genomic DNA
ttacacttaggagatttcaact

SEQ ID NO: 67325 - DNA, 16 bp, Homo sapiens
  source 1..16: mol_type = genomic DNA
ttacagtcagaggttc

SEQ ID NO: 67326 - DNA, 17 bp, Homo sapiens
  source 1..17: mol_type = genomic DNA
ttacagtcagaggttca

SEQ ID NO: 67327 - DNA, 20 bp, Homo sapiens
  source 1..20: mol_type = genomic DNA
ttacctcctcaaagcaatac

SEQ ID NO: 67328 - DNA, 20 bp, Homo sapiens
  source 1..20: mol_type = genomic DNA
ttacgaccccttatttaccc

SEQ ID NO: 67329 - DNA, 21 bp, Homo sapiens
  source 1..21: mol_type = genomic DNA
ttacgaccccttatttacccc

SEQ ID NO: 67330 - DNA, 22 bp, Homo sapiens
  source 1..22: mol_type = genomic DNA
ttacgaccccttatttacccca

SEQ ID NO: 67331 - DNA, 18 bp, Homo sapiens
  source 1..18: mol_type = genomic DNA
ttagaatcttagctttgg

SEQ ID NO: 67332 - DNA, 16 bp, Homo sapiens
  source 1..16: mol_type = genomic DNA
ttagacgggctcacat

SEQ ID NO: 67333 - DNA, 17 bp, Homo sapiens
  source 1..17: mol_type = genomic DNA
ttagacgggctcacatc

SEQ ID NO: 67334 - DNA, 18 bp, Homo sapiens
  source 1..18: mol_type = genomic DNA
ttagacgggctcacatca

SEQ ID NO: 67335 - DNA, 19 bp, Homo sapiens
  source 1..19: mol_type = genomic DNA
ttagacgggctcacatcac

SEQ ID NO: 67336 - DNA, 20 bp, Homo sapiens
  source 1..20: mol_type = genomic DNA
ttagacgggctcacatcacc

SEQ ID NO: 67337 - DNA, 21 bp, Homo sapiens
  source 1..21: mol_type = genomic DNA
ttagacgggctcacatcaccc

SEQ ID NO: 67338 - DNA, 23 bp, Homo sapiens
  source 1..23: mol_type = genomic DNA
ttagacgggctcacatcacccca

SEQ ID NO: 67339 - DNA, 21 bp, Homo sapiens
  source 1..21: mol_type = genomic DNA
ttagagccagactgcctgggt

SEQ ID NO: 67340 - DNA, 22 bp, Homo sapiens
  source 1..22: mol_type = genomic DNA
ttagagccagactgcctgggtt

SEQ ID NO: 67341 - DNA, 23 bp, Homo sapiens
  source 1..23: mol_type = genomic DNA
ttagagccagactgcctgggttt

SEQ ID NO: 67342 - DNA, 17 bp, Homo sapiens
  source 1..17: mol_type = genomic DNA
ttagcactctggactct

SEQ ID NO: 67343 - DNA, 18 bp, Homo sapiens
  source 1..18: mol_type = genomic DNA
ttagcactctggactctg

SEQ ID NO: 67344 - DNA, 19 bp, Homo sapiens
  source 1..19: mol_type = genomic DNA
ttagcactctggactctga

SEQ ID NO: 67345 - DNA, 18 bp, Homo sapiens
  source 1..18: mol_type = genomic DNA
ttagcactctggactttg

SEQ ID NO: 67346 - DNA, 18 bp, Homo sapiens
  source 1..18: mol_type = genomic DNA
ttagcattaaccttttaa

SEQ ID NO: 67347 - DNA, 19 bp, Homo sapiens
  source 1..19: mol_type = genomic DNA
ttagcattaaccttttaag

SEQ ID NO: 67348 - DNA, 20 bp, Homo sapiens
  source 1..20: mol_type = genomic DNA
ttagcattaaccttttaagt

SEQ ID NO: 67349 - DNA, 16 bp, Homo sapiens
  source 1..16: mol_type = genomic DNA
ttaggagatttcaact

SEQ ID NO: 67350 - DNA, 17 bp, Homo sapiens
  source 1..17: mol_type = genomic DNA
ttaggagatttcaactt

SEQ ID NO: 67351 - DNA, 18 bp, Homo sapiens
  source 1..18: mol_type = genomic DNA
ttaggagatttcaactta

SEQ ID NO: 67352 - DNA, 19 bp, Homo sapiens
  source 1..19: mol_type = genomic DNA
ttaggagatttcaacttaa

SEQ ID NO: 67353 - DNA, 20 bp, Homo sapiens
  source 1..20: mol_type = genomic DNA
ttaggagatttcaacttaac

SEQ ID NO: 67354 - DNA, 21 bp, Homo sapiens
  source 1..21: mol_type = genomic DNA
ttaggagatttcaacttaact

SEQ ID NO: 67355 - DNA, 18 bp, Homo sapiens
  source 1..18: mol_type = genomic DNA
ttaggattcctggttttc

SEQ ID NO: 67356 - DNA, 16 bp, Homo sapiens
  source 1..16: mol_type = genomic DNA
ttaggattcggcgctc

SEQ ID NO: 67357 - DNA, 17 bp, Homo sapiens
  source 1..17: mol_type = genomic DNA
ttaggattcggcgctct

SEQ ID NO: 67358 - DNA, 18 bp, Homo sapiens
  source 1..18: mol_type = genomic DNA
ttaggattcggcgctctc

SEQ ID NO: 67359 - DNA, 19 bp, Homo sapiens
  source 1..19: mol_type = genomic DNA
ttaggattcggcgctctca

SEQ ID NO: 67360 - DNA, 21 bp, Homo sapiens
  source 1..21: mol_type = genomic DNA
ttaggcctctttttaccacca

SEQ ID NO: 67361 - DNA, 17 bp, Homo sapiens
  source 1..17: mol_type = genomic DNA
ttagggtgcttagctgt

SEQ ID NO: 67362 - DNA, 17 bp, Homo sapiens
  source 1..17: mol_type = genomic DNA
ttagtactctgcgttgt

SEQ ID NO: 67363 - DNA, 18 bp, Homo sapiens
  source 1..18: mol_type = genomic DNA
ttagtactctgcgttgtg

SEQ ID NO: 67364 - DNA, 19 bp, Homo sapiens
  source 1..19: mol_type = genomic DNA
ttatacccttcccgtacta

SEQ ID NO: 67365 - DNA, 20 bp, Homo sapiens
  source 1..20: mol_type = genomic DNA
ttatacccttcccgtactac

SEQ ID NO: 67366 - DNA, 21 bp, Homo sapiens
  source 1..21: mol_type = genomic DNA
ttatacccttcccgtactacc

SEQ ID NO: 67367 - DNA, 22 bp, Homo sapiens
  source 1..22: mol_type = genomic DNA
ttatacccttcccgtactacca

SEQ ID NO: 67368 - DNA, 24 bp, Homo sapiens
  source 1..24: mol_type = genomic DNA
ttatgataatcatatttaccaacc

SEQ ID NO: 67369 - DNA, 25 bp, Homo sapiens
  source 1..25: mol_type = genomic DNA
ttatgataatcatatttaccaacca

SEQ ID NO: 67370 - DNA, 17 bp, Homo sapiens
  source 1..17: mol_type = genomic DNA
ttatgtagcttacctcc

SEQ ID NO: 67371 - DNA, 18 bp, Homo sapiens
  source 1..18: mol_type = genomic DNA
ttatgtagcttacctcct

SEQ ID NO: 67372 - DNA, 16 bp, Homo sapiens
  source 1..16: mol_type = genomic DNA
ttcaaaaaagagtacc

SEQ ID NO: 67373 - DNA, 17 bp, Homo sapiens
  source 1..17: mol_type = genomic DNA
ttcaaaaaagagtacca

SEQ ID NO: 67374 - DNA, 17 bp, Homo sapiens
  source 1..17: mol_type = genomic DNA
ttcaaacctgccggggc

SEQ ID NO: 67375 - DNA, 19 bp, Homo sapiens
  source 1..19: mol_type = genomic DNA
ttcaaacctgccggggctt

SEQ ID NO: 67376 - DNA, 20 bp, Homo sapiens
  source 1..20: mol_type = genomic DNA
ttcaaacctgccggggcttc

SEQ ID NO: 67377 - DNA, 21 bp, Homo sapiens
  source 1..21: mol_type = genomic DNA
ttcaaacctgccggggcttcc

SEQ ID NO: 67378 - DNA, 20 bp, Homo sapiens
  source 1..20: mol_type = genomic DNA
ttcaacttaacttgaccgct

SEQ ID NO: 67379 - DNA, 21 bp, Homo sapiens
  source 1..21: mol_type = genomic DNA
ttcaacttaacttgaccgctc

SEQ ID NO: 67380 - DNA, 22 bp, Homo sapiens
  source 1..22: mol_type = genomic DNA
ttcaacttaacttgaccgctct

SEQ ID NO: 67381 - DNA, 24 bp, Homo sapiens
  source 1..24: mol_type = genomic DNA
ttcaacttaacttgaccgctctga

SEQ ID NO: 67382 - DNA, 25 bp, Homo sapiens
  source 1..25: mol_type = genomic DNA
ttcaacttaacttgaccgctctgac

SEQ ID NO: 67383 - DNA, 19 bp, Homo sapiens
  source 1..19: mol_type = genomic DNA
ttcaagtccctgttcgggc

SEQ ID NO: 67384 - DNA, 21 bp, Homo sapiens
  source 1..21: mol_type = genomic DNA
ttcaagtccctgttcgggcgc

SEQ ID NO: 67385 - DNA, 22 bp, Homo sapiens
  source 1..22: mol_type = genomic DNA
ttcaagtccctgttcgggcgcc

SEQ ID NO: 67386 - DNA, 16 bp, Homo sapiens
  source 1..16: mol_type = genomic DNA
ttcaggtcgcagtctc

SEQ ID NO: 67387 - DNA, 17 bp, Homo sapiens
  source 1..17: mol_type = genomic DNA
ttcaggtcgcagtctcc

SEQ ID NO: 67388 - DNA, 18 bp, Homo sapiens
  source 1..18: mol_type = genomic DNA
ttcaggtcgcagtctccc

SEQ ID NO: 67389 - DNA, 20 bp, Homo sapiens
  source 1..20: mol_type = genomic DNA
ttcagtggtagaattctcgc

SEQ ID NO: 67390 - DNA, 21 bp, Homo sapiens
  source 1..21: mol_type = genomic DNA
ttcagtggtagaattctcgcc

SEQ ID NO: 67391 - DNA, 16 bp, Homo sapiens
  source 1..16: mol_type = genomic DNA
ttccccgacggggagc

SEQ ID NO: 67392 - DNA, 18 bp, Homo sapiens
  source 1..18: mol_type = genomic DNA
ttccccgacggggagcca

SEQ ID NO: 67393 - DNA, 17 bp, Homo sapiens
  source 1..17: mol_type = genomic DNA
ttcccggccaacgcacc

SEQ ID NO: 67394 - DNA, 18 bp, Homo sapiens
  source 1..18: mol_type = genomic DNA
ttcccggccaacgcacca

SEQ ID NO: 67395 - DNA, 17 bp, Homo sapiens
  source 1..17: mol_type = genomic DNA
ttcccggccaatgcacc

SEQ ID NO: 67396 - DNA, 18 bp, Homo sapiens
  source 1..18: mol_type = genomic DNA
ttcccggccaatgcacca

SEQ ID NO: 67397 - DNA, 17 bp, Homo sapiens
  source 1..17: mol_type = genomic DNA
ttcccggcccatgcacc

SEQ ID NO: 67398 - DNA, 18 bp, Homo sapiens
  source 1..18: mol_type = genomic DNA
ttcccggcccatgcacca

SEQ ID NO: 67399 - DNA, 16 bp, Homo sapiens
  source 1..16: mol_type = genomic DNA
ttcccgggcggcgcac

SEQ ID NO: 67400 - DNA, 17 bp, Homo sapiens
  source 1..17: mol_type = genomic DNA
ttcccgggcggcgcacc

SEQ ID NO: 67401 - DNA, 18 bp, Homo sapiens
  source 1..18: mol_type = genomic DNA
ttcccgggcggcgcacca

SEQ ID NO: 67402 - DNA, 16 bp, Homo sapiens
  source 1..16: mol_type = genomic DNA
ttcccggtcagggaac

SEQ ID NO: 67403 - DNA, 17 bp, Homo sapiens
  source 1..17: mol_type = genomic DNA
ttcccggtcagggaacc

SEQ ID NO: 67404 - DNA, 18 bp, Homo sapiens
  source 1..18: mol_type = genomic DNA
ttcccggtcagggaacca

SEQ ID NO: 67405 - DNA, 19 bp, Homo sapiens
  source 1..19: mol_type = genomic DNA
ttccggatcagaagattga

SEQ ID NO: 67406 - DNA, 20 bp, Homo sapiens
  source 1..20: mol_type = genomic DNA
ttccggatcagaagattgag

SEQ ID NO: 67407 - DNA, 16 bp, Homo sapiens
  source 1..16: mol_type = genomic DNA
ttccggctcgaaggac

SEQ ID NO: 67408 - DNA, 17 bp, Homo sapiens
  source 1..17: mol_type = genomic DNA
ttccggctcgaaggacc

SEQ ID NO: 67409 - DNA, 18 bp, Homo sapiens
  source 1..18: mol_type = genomic DNA
ttccggctcgaaggacca

SEQ ID NO: 67410 - DNA, 20 bp, Homo sapiens
  source 1..20: mol_type = genomic DNA
ttccgggttcgagtcccggc

SEQ ID NO: 67411 - DNA, 21 bp, Homo sapiens
  source 1..21: mol_type = genomic DNA
ttccgggttcgagtcccggcg

SEQ ID NO: 67412 - DNA, 17 bp, Homo sapiens
  source 1..17: mol_type = genomic DNA
ttccgtagtgtagtggt

SEQ ID NO: 67413 - DNA, 21 bp, Homo sapiens
  source 1..21: mol_type = genomic DNA
ttccgtagtgtagtggttatc

SEQ ID NO: 67414 - DNA, 17 bp, Homo sapiens
  source 1..17: mol_type = genomic DNA
ttcctcttcttaacacc

SEQ ID NO: 67415 - DNA, 18 bp, Homo sapiens
  source 1..18: mol_type = genomic DNA
ttccttccttttttgcca

SEQ ID NO: 67416 - DNA, 20 bp, Homo sapiens
  source 1..20: mol_type = genomic DNA
ttcgaatccgagtcacggca

SEQ ID NO: 67417 - DNA, 22 bp, Homo sapiens
  source 1..22: mol_type = genomic DNA
ttcgaatccgagtcacggcacc

SEQ ID NO: 67418 - DNA, 21 bp, Homo sapiens
  source 1..21: mol_type = genomic DNA
ttcgactcattaaattatgat

SEQ ID NO: 67419 - DNA, 16 bp, Homo sapiens
  source 1..16: mol_type = genomic DNA
ttcgactcccggtgtg

SEQ ID NO: 67420 - DNA, 21 bp, Homo sapiens
  source 1..21: mol_type = genomic DNA
ttcgactcccggtgtgggaac

SEQ ID NO: 67421 - DNA, 22 bp, Homo sapiens
  source 1..22: mol_type = genomic DNA
ttcgactcccggtgtgggaacc

SEQ ID NO: 67422 - DNA, 23 bp, Homo sapiens
  source 1..23: mol_type = genomic DNA
ttcgactcccggtgtgggaacca

SEQ ID NO: 67423 - DNA, 18 bp, Homo sapiens
  source 1..18: mol_type = genomic DNA
ttcgagccccacgttggg

SEQ ID NO: 67424 - DNA, 17 bp, Homo sapiens
  source 1..17: mol_type = genomic DNA
ttcgatagctcagctgg

SEQ ID NO: 67425 - DNA, 17 bp, Homo sapiens
  source 1..17: mol_type = genomic DNA
ttcgatagctcagttgg

SEQ ID NO: 67426 - DNA, 23 bp, Homo sapiens
  source 1..23: mol_type = genomic DNA
ttcgatagctcagttggtagagc

SEQ ID NO: 67427 - DNA, 16 bp, Homo sapiens
  source 1..16: mol_type = genomic DNA
ttcgattcccgggcgg

SEQ ID NO: 67428 - DNA, 17 bp, Homo sapiens
  source 1..17: mol_type = genomic DNA
ttcgattcccgggcggc

SEQ ID NO: 67429 - DNA, 17 bp, Homo sapiens
  source 1..17: mol_type = genomic DNA
ttcgattcccggtcagg

SEQ ID NO: 67430 - DNA, 20 bp, Homo sapiens
  source 1..20: mol_type = genomic DNA
ttcgattcccggtcagggaa

SEQ ID NO: 67431 - DNA, 21 bp, Homo sapiens
  source 1..21: mol_type = genomic DNA
ttcgattcccggtcagggaac

SEQ ID NO: 67432 - DNA, 22 bp, Homo sapiens
  source 1..22: mol_type = genomic DNA
ttcgattcccggtcagggaacc

SEQ ID NO: 67433 - DNA, 23 bp, Homo sapiens
  source 1..23: mol_type = genomic DNA
ttcgattccggctcgaaggacca

SEQ ID NO: 67434 - DNA, 21 bp, Homo sapiens
  source 1..21: mol_type = genomic DNA
ttcgattctcatagtcctagc

SEQ ID NO: 67435 - DNA, 22 bp, Homo sapiens
  source 1..22: mol_type = genomic DNA
ttcgattctcatagtcctagcc

SEQ ID NO: 67436 - DNA, 17 bp, Homo sapiens
  source 1..17: mol_type = genomic DNA
ttctcatagtcctagcc

SEQ ID NO: 67437 - DNA, 18 bp, Homo sapiens
  source 1..18: mol_type = genomic DNA
ttctcatagtcctagcca

SEQ ID NO: 67438 - DNA, 20 bp, Homo sapiens
  source 1..20: mol_type = genomic DNA
ttctcgcctgccacgcggga

SEQ ID NO: 67439 - DNA, 17 bp, Homo sapiens
  source 1..17: mol_type = genomic DNA
ttctcgctggggcctcc

SEQ ID NO: 67440 - DNA, 18 bp, Homo sapiens
  source 1..18: mol_type = genomic DNA
ttctcgctggggcctcca

SEQ ID NO: 67441 - DNA, 22 bp, Homo sapiens
  source 1..22: mol_type = genomic DNA
ttgaatccagcgatccgagttc

SEQ ID NO: 67442 - DNA, 20 bp, Homo sapiens
  source 1..20: mol_type = genomic DNA
ttgacaacattcaaaaaaga

SEQ ID NO: 67443 - DNA, 16 bp, Homo sapiens
  source 1..16: mol_type = genomic DNA
ttgaccgctctgacca

SEQ ID NO: 67444 - DNA, 17 bp, Homo sapiens
  source 1..17: mol_type = genomic DNA
ttgagggttcgagtccc

SEQ ID NO: 67445 - DNA, 18 bp, Homo sapiens
  source 1..18: mol_type = genomic DNA
ttgagggttcgagtccct

SEQ ID NO: 67446 - DNA, 16 bp, Homo sapiens
  source 1..16: mol_type = genomic DNA
ttgatagagtaaataa

SEQ ID NO: 67447 - DNA, 17 bp, Homo sapiens
  source 1..17: mol_type = genomic DNA
ttgatagagtaaataat

SEQ ID NO: 67448 - DNA, 20 bp, Homo sapiens
  source 1..20: mol_type = genomic DNA
ttgatagagtaaataatagg

SEQ ID NO: 67449 - DNA, 21 bp, Homo sapiens
  source 1..21: mol_type = genomic DNA
ttgatagagtaaataatagga

SEQ ID NO: 67450 - DNA, 17 bp, Homo sapiens
  source 1..17: mol_type = genomic DNA
ttgattagggtgcttag

SEQ ID NO: 67451 - DNA, 19 bp, Homo sapiens
  source 1..19: mol_type = genomic DNA
ttgcaaattcgaagaagca

SEQ ID NO: 67452 - DNA, 20 bp, Homo sapiens
  source 1..20: mol_type = genomic DNA
ttgcaaattcgaagaagcag

SEQ ID NO: 67453 - DNA, 20 bp, Homo sapiens
  source 1..20: mol_type = genomic DNA
ttgcaatacttaatttctgc

SEQ ID NO: 67454 - DNA, 21 bp, Homo sapiens
  source 1..21: mol_type = genomic DNA
ttgcaatacttaatttctgcc

SEQ ID NO: 67455 - DNA, 22 bp, Homo sapiens
  source 1..22: mol_type = genomic DNA
ttgcaatacttaatttctgcca

SEQ ID NO: 67456 - DNA, 20 bp, Homo sapiens
  source 1..20: mol_type = genomic DNA
ttggggggttcgattccttc

SEQ ID NO: 67457 - DNA, 21 bp, Homo sapiens
  source 1..21: mol_type = genomic DNA
ttggggggttcgattccttcc

SEQ ID NO: 67458 - DNA, 18 bp, Homo sapiens
  source 1..18: mol_type = genomic DNA
ttgggtccgagaggtccc

SEQ ID NO: 67459 - DNA, 20 bp, Homo sapiens
  source 1..20: mol_type = genomic DNA
ttgggtccgagaggtcccgg

SEQ ID NO: 67460 - DNA, 18 bp, Homo sapiens
  source 1..18: mol_type = genomic DNA
ttgggtgcgagaggtccc

SEQ ID NO: 67461 - DNA, 20 bp, Homo sapiens
  source 1..20: mol_type = genomic DNA
ttgggtgcgagaggtcccgg

SEQ ID NO: 67462 - DNA, 16 bp, Homo sapiens
  source 1..16: mol_type = genomic DNA
ttggtcgtggttgtag

SEQ ID NO: 67463 - DNA, 17 bp, Homo sapiens
  source 1..17: mol_type = genomic DNA
ttggtcgtggttgtagt

SEQ ID NO: 67464 - DNA, 18 bp, Homo sapiens
  source 1..18: mol_type = genomic DNA
ttggtcgtggttgtagtc

SEQ ID NO: 67465 - DNA, 19 bp, Homo sapiens
  source 1..19: mol_type = genomic DNA
ttggtcgtggttgtagtcc

SEQ ID NO: 67466 - DNA, 20 bp, Homo sapiens
  source 1..20: mol_type = genomic DNA
ttggtcgtggttgtagtccg

SEQ ID NO: 67467 - DNA, 21 bp, Homo sapiens
  source 1..21: mol_type = genomic DNA
ttggtcgtggttgtagtccgt

SEQ ID NO: 67468 - DNA, 22 bp, Homo sapiens
  source 1..22: mol_type = genomic DNA
ttggtcgtggttgtagtccgtg

SEQ ID NO: 67469 - DNA, 23 bp, Homo sapiens
  source 1..23: mol_type = genomic DNA
ttggtcgtggttgtagtccgtgc

SEQ ID NO: 67470 - DNA, 24 bp, Homo sapiens
  source 1..24: mol_type = genomic DNA
ttggtcgtggttgtagtccgtgcg

SEQ ID NO: 67471 - DNA, 25 bp, Homo sapiens
  source 1..25: mol_type = genomic DNA
ttggtcgtggttgtagtccgtgcga

SEQ ID NO: 67472 - DNA, 17 bp, Homo sapiens
  source 1..17: mol_type = genomic DNA
ttggtgcaactccaaat

SEQ ID NO: 67473 - DNA, 24 bp, Homo sapiens
  source 1..24: mol_type = genomic DNA
ttggtgcaactccaaataaaagta

SEQ ID NO: 67474 - DNA, 25 bp, Homo sapiens
  source 1..25: mol_type = genomic DNA
ttggtggtatagtggttagcatagc

SEQ ID NO: 67475 - DNA, 19 bp, Homo sapiens
  source 1..19: mol_type = genomic DNA
ttggtggttcagtggtaga

SEQ ID NO: 67476 - DNA, 20 bp, Homo sapiens
  source 1..20: mol_type = genomic DNA
ttggtggttcagtggtagaa

SEQ ID NO: 67477 - DNA, 21 bp, Homo sapiens
  source 1..21: mol_type = genomic DNA
ttggtggttcagtggtagaat

SEQ ID NO: 67478 - DNA, 22 bp, Homo sapiens
  source 1..22: mol_type = genomic DNA
ttggtggttcagtggtagaatt

SEQ ID NO: 67479 - DNA, 23 bp, Homo sapiens
  source 1..23: mol_type = genomic DNA
ttggtggttcagtggtagaattc

SEQ ID NO: 67480 - DNA, 24 bp, Homo sapiens
  source 1..24: mol_type = genomic DNA
ttggtggttcagtggtagaattct

SEQ ID NO: 67481 - DNA, 25 bp, Homo sapiens
  source 1..25: mol_type = genomic DNA
ttggtggttcagtggtagaattctc

SEQ ID NO: 67482 - DNA, 25 bp, Homo sapiens
  source 1..25: mol_type = genomic DNA
ttggttatacccttcccgtactacc

SEQ ID NO: 67483 - DNA, 16 bp, Homo sapiens
  source 1..16: mol_type = genomic DNA
ttgtaaaccggagatg

SEQ ID NO: 67484 - DNA, 18 bp, Homo sapiens
  source 1..18: mol_type = genomic DNA
ttgtaaaccggagatgaa

SEQ ID NO: 67485 - DNA, 19 bp, Homo sapiens
  source 1..19: mol_type = genomic DNA
ttgtaaaccggagatgaaa

SEQ ID NO: 67486 - DNA, 20 bp, Homo sapiens
  source 1..20: mol_type = genomic DNA
ttgtaaaccggagatgaaaa

SEQ ID NO: 67487 - DNA, 21 bp, Homo sapiens
  source 1..21: mol_type = genomic DNA
ttgtaaaccggagatgaaaac

SEQ ID NO: 67488 - DNA, 22 bp, Homo sapiens
  source 1..22: mol_type = genomic DNA
ttgtaaaccggagatgaaaacc

SEQ ID NO: 67489 - DNA, 23 bp, Homo sapiens
  source 1..23: mol_type = genomic DNA
ttgtaaaccggagatgaaaacct

SEQ ID NO: 67490 - DNA, 17 bp, Homo sapiens
  source 1..17: mol_type = genomic DNA
ttgtagtccgtgcgaga

SEQ ID NO: 67491 - DNA, 18 bp, Homo sapiens
  source 1..18: mol_type = genomic DNA
ttgtagtccgtgcgagaa

SEQ ID NO: 67492 - DNA, 19 bp, Homo sapiens
  source 1..19: mol_type = genomic DNA
ttgtagtccgtgcgagaat

SEQ ID NO: 67493 - DNA, 20 bp, Homo sapiens
  source 1..20: mol_type = genomic DNA
ttgtagtccgtgcgagaata

SEQ ID NO: 67494 - DNA, 21 bp, Homo sapiens
  source 1..21: mol_type = genomic DNA
ttgtagtccgtgcgagaatac

SEQ ID NO: 67495 - DNA, 22 bp, Homo sapiens
  source 1..22: mol_type = genomic DNA
ttgtagtccgtgcgagaatacc

SEQ ID NO: 67496 - DNA, 23 bp, Homo sapiens
  source 1..23: mol_type = genomic DNA
ttgtagtccgtgcgagaatacca

SEQ ID NO: 67497 - DNA, 20 bp, Homo sapiens
  source 1..20: mol_type = genomic DNA
ttgtcaaagttaaattatag

SEQ ID NO: 67498 - DNA, 16 bp, Homo sapiens
  source 1..16: mol_type = genomic DNA
ttgtgaatctgacaac

SEQ ID NO: 67499 - DNA, 17 bp, Homo sapiens
  source 1..17: mol_type = genomic DNA
ttgtgaatctgacaaca

SEQ ID NO: 67500 - DNA, 18 bp, Homo sapiens
  source 1..18: mol_type = genomic DNA
ttgtgaatctgacaacag

SEQ ID NO: 67501 - DNA, 19 bp, Homo sapiens
  source 1..19: mol_type = genomic DNA
ttgtgaatctgacaacaga

SEQ ID NO: 67502 - DNA, 20 bp, Homo sapiens
  source 1..20: mol_type = genomic DNA
ttgtgaatctgacaacagag

SEQ ID NO: 67503 - DNA, 21 bp, Homo sapiens
  source 1..21: mol_type = genomic DNA
ttgtgaatctgacaacagagg

SEQ ID NO: 67504 - DNA, 22 bp, Homo sapiens
  source 1..22: mol_type = genomic DNA
ttgtgaatctgacaacagaggc

SEQ ID NO: 67505 - DNA, 23 bp, Homo sapiens
  source 1..23: mol_type = genomic DNA
ttgtgaatctgacaacagaggct

SEQ ID NO: 67506 - DNA, 24 bp, Homo sapiens
  source 1..24: mol_type = genomic DNA
ttgtgaatctgacaacagaggctt

SEQ ID NO: 67507 - DNA, 25 bp, Homo sapiens
  source 1..25: mol_type = genomic DNA
ttgtgaatctgacaacagaggctta

SEQ ID NO: 67508 - DNA, 17 bp, Homo sapiens
  source 1..17: mol_type = genomic DNA
ttgtgggttcgagtccc

SEQ ID NO: 67509 - DNA, 20 bp, Homo sapiens
  source 1..20: mol_type = genomic DNA
ttgtgggttcgagtcccatc

SEQ ID NO: 67510 - DNA, 17 bp, Homo sapiens
  source 1..17: mol_type = genomic DNA
ttgtgggtttaagtccc

SEQ ID NO: 67511 - DNA, 20 bp, Homo sapiens
  source 1..20: mol_type = genomic DNA
ttgtgggtttaagtcccatt

SEQ ID NO: 67512 - DNA, 16 bp, Homo sapiens
  source 1..16: mol_type = genomic DNA
tttaaacaaaacgaat

SEQ ID NO: 67513 - DNA, 20 bp, Homo sapiens
  source 1..20: mol_type = genomic DNA
tttaaacaaaacgaatgatt

SEQ ID NO: 67514 - DNA, 17 bp, Homo sapiens
  source 1..17: mol_type = genomic DNA
tttaaattagaatctta

SEQ ID NO: 67515 - DNA, 18 bp, Homo sapiens
  source 1..18: mol_type = genomic DNA
tttaaattagaatcttag

SEQ ID NO: 67516 - DNA, 19 bp, Homo sapiens
  source 1..19: mol_type = genomic DNA
tttaaattagaatcttagc

SEQ ID NO: 67517 - DNA, 20 bp, Homo sapiens
  source 1..20: mol_type = genomic DNA
tttaaattagaatcttagct

SEQ ID NO: 67518 - DNA, 21 bp, Homo sapiens
  source 1..21: mol_type = genomic DNA
tttaaattagaatcttagctt

SEQ ID NO: 67519 - DNA, 18 bp, Homo sapiens
  source 1..18: mol_type = genomic DNA
tttaaccaaaacatcaga

SEQ ID NO: 67520 - DNA, 22 bp, Homo sapiens
  source 1..22: mol_type = genomic DNA
tttaagtcccattggtctagcc

SEQ ID NO: 67521 - DNA, 20 bp, Homo sapiens
  source 1..20: mol_type = genomic DNA
tttaagttaaagattaagag

SEQ ID NO: 67522 - DNA, 23 bp, Homo sapiens
  source 1..23: mol_type = genomic DNA
tttaagttaaagattaagagaac

SEQ ID NO: 67523 - DNA, 24 bp, Homo sapiens
  source 1..24: mol_type = genomic DNA
tttaagttaaagattaagagaacc

SEQ ID NO: 67524 - DNA, 25 bp, Homo sapiens
  source 1..25: mol_type = genomic DNA
tttaagttaaagattaagagaacca

SEQ ID NO: 67525 - DNA, 18 bp, Homo sapiens
  source 1..18: mol_type = genomic DNA
tttacacgcagaaggtcc

SEQ ID NO: 67526 - DNA, 16 bp, Homo sapiens
  source 1..16: mol_type = genomic DNA
tttacagtcagaggtt

SEQ ID NO: 67527 - DNA, 17 bp, Homo sapiens
  source 1..17: mol_type = genomic DNA
tttacagtcagaggttc

SEQ ID NO: 67528 - DNA, 18 bp, Homo sapiens
  source 1..18: mol_type = genomic DNA
tttacagtcagaggttca

SEQ ID NO: 67529 - DNA, 16 bp, Homo sapiens
  source 1..16: mol_type = genomic DNA
tttagacgggctcaca

SEQ ID NO: 67530 - DNA, 17 bp, Homo sapiens
  source 1..17: mol_type = genomic DNA
tttagacgggctcacat

SEQ ID NO: 67531 - DNA, 18 bp, Homo sapiens
  source 1..18: mol_type = genomic DNA
tttagacgggctcacatc

SEQ ID NO: 67532 - DNA, 19 bp, Homo sapiens
  source 1..19: mol_type = genomic DNA
tttagacgggctcacatca

SEQ ID NO: 67533 - DNA, 20 bp, Homo sapiens
  source 1..20: mol_type = genomic DNA
tttagacgggctcacatcac

SEQ ID NO: 67534 - DNA, 21 bp, Homo sapiens
  source 1..21: mol_type = genomic DNA
tttagacgggctcacatcacc

SEQ ID NO: 67535 - DNA, 24 bp, Homo sapiens
  source 1..24: mol_type = genomic DNA
tttagacgggctcacatcacccca

SEQ ID NO: 67536 - DNA, 17 bp, Homo sapiens
  source 1..17: mol_type = genomic DNA
tttaggctccagtcatt

SEQ ID NO: 67537 - DNA, 21 bp, Homo sapiens
  source 1..21: mol_type = genomic DNA
tttaggctccagtcatttcga

SEQ ID NO: 67538 - DNA, 18 bp, Homo sapiens
  source 1..18: mol_type = genomic DNA
tttatgtagcttacctcc

SEQ ID NO: 67539 - DNA, 16 bp, Homo sapiens
  source 1..16: mol_type = genomic DNA
tttcaacttaacttga

SEQ ID NO: 67540 - DNA, 17 bp, Homo sapiens
  source 1..17: mol_type = genomic DNA
tttcaacttaacttgac

SEQ ID NO: 67541 - DNA, 18 bp, Homo sapiens
  source 1..18: mol_type = genomic DNA
tttcaacttaacttgacc

SEQ ID NO: 67542 - DNA, 20 bp, Homo sapiens
  source 1..20: mol_type = genomic DNA
tttcaacttaacttgaccgc

SEQ ID NO: 67543 - DNA, 21 bp, Homo sapiens
  source 1..21: mol_type = genomic DNA
tttcaacttaacttgaccgct

SEQ ID NO: 67544 - DNA, 22 bp, Homo sapiens
  source 1..22: mol_type = genomic DNA
tttcaacttaacttgaccgctc

SEQ ID NO: 67545 - DNA, 23 bp, Homo sapiens
  source 1..23: mol_type = genomic DNA
tttcaacttaacttgaccgctct

SEQ ID NO: 67546 - DNA, 17 bp, Homo sapiens
  source 1..17: mol_type = genomic DNA
tttcatattgaattgca

SEQ ID NO: 67547 - DNA, 18 bp, Homo sapiens
  source 1..18: mol_type = genomic DNA
tttccgtagtgtagtggt

SEQ ID NO: 67548 - DNA, 22 bp, Homo sapiens
  source 1..22: mol_type = genomic DNA
tttccgtagtgtagtggttatc

SEQ ID NO: 67549 - DNA, 20 bp, Homo sapiens
  source 1..20: mol_type = genomic DNA
tttgacaacattcaaaaaag

SEQ ID NO: 67550 - DNA, 21 bp, Homo sapiens
  source 1..21: mol_type = genomic DNA
tttgacaacattcaaaaaaga

SEQ ID NO: 67551 - DNA, 17 bp, Homo sapiens
  source 1..17: mol_type = genomic DNA
tttgatagagtaaataa

SEQ ID NO: 67552 - DNA, 18 bp, Homo sapiens
  source 1..18: mol_type = genomic DNA
tttgatagagtaaataat

SEQ ID NO: 67553 - DNA, 22 bp, Homo sapiens
  source 1..22: mol_type = genomic DNA
tttgatagagtaaataatagga

SEQ ID NO: 67554 - DNA, 24 bp, Homo sapiens
  source 1..24: mol_type = genomic DNA
tttgatagagtaaataataggagc

SEQ ID NO: 67555 - DNA, 16 bp, Homo sapiens
  source 1..16: mol_type = genomic DNA
tttgcagtccttacca

SEQ ID NO: 67556 - DNA, 22 bp, Homo sapiens
  source 1..22: mol_type = genomic DNA
tttggggggttcgattccttcc

SEQ ID NO: 67557 - DNA, 18 bp, Homo sapiens
  source 1..18: mol_type = genomic DNA
tttgggtccgagaggtcc

SEQ ID NO: 67558 - DNA, 19 bp, Homo sapiens
  source 1..19: mol_type = genomic DNA
tttgggtccgagaggtccc

SEQ ID NO: 67559 - DNA, 21 bp, Homo sapiens
  source 1..21: mol_type = genomic DNA
tttgggtccgagaggtcccgg

SEQ ID NO: 67560 - DNA, 18 bp, Homo sapiens
  source 1..18: mol_type = genomic DNA
tttgggtgcgagaggtcc

SEQ ID NO: 67561 - DNA, 19 bp, Homo sapiens
  source 1..19: mol_type = genomic DNA
tttgggtgcgagaggtccc

SEQ ID NO: 67562 - DNA, 21 bp, Homo sapiens
  source 1..21: mol_type = genomic DNA
tttgggtgcgagaggtcccgg

SEQ ID NO: 67563 - DNA, 19 bp, Homo sapiens
  source 1..19: mol_type = genomic DNA
tttggtgcaactccaaata

SEQ ID NO: 67564 - DNA, 25 bp, Homo sapiens
  source 1..25: mol_type = genomic DNA
tttggtgcaactccaaataaaagta

SEQ ID NO: 67565 - DNA, 18 bp, Homo sapiens
  source 1..18: mol_type = genomic DNA
tttgtgggtttaagtccc

SEQ ID NO: 67566 - DNA, 21 bp, Homo sapiens
  source 1..21: mol_type = genomic DNA
tttgtgggtttaagtcccatt

SEQ ID NO: 67567 - DNA, 16 bp, Homo sapiens
  source 1..16: mol_type = genomic DNA
ttttaaaggataacag

SEQ ID NO: 67568 - DNA, 17 bp, Homo sapiens
  source 1..17: mol_type = genomic DNA
ttttaaaggataacagc

SEQ ID NO: 67569 - DNA, 18 bp, Homo sapiens
  source 1..18: mol_type = genomic DNA
ttttaaaggataacagct

SEQ ID NO: 67570 - DNA, 21 bp, Homo sapiens
  source 1..21: mol_type = genomic DNA
ttttaagttaaagattaagag

SEQ ID NO: 67571 - DNA, 24 bp, Homo sapiens
  source 1..24: mol_type = genomic DNA
ttttaagttaaagattaagagaac

SEQ ID NO: 67572 - DNA, 25 bp, Homo sapiens
  source 1..25: mol_type = genomic DNA
ttttaagttaaagattaagagaacc

SEQ ID NO: 67573 - DNA, 17 bp, Homo sapiens
  source 1..17: mol_type = genomic DNA
ttttcatatcattggtc

SEQ ID NO: 67574 - DNA, 17 bp, Homo sapiens
  source 1..17: mol_type = genomic DNA
ttttcatattgaattgc

SEQ ID NO: 67575 - DNA, 18 bp, Homo sapiens
  source 1..18: mol_type = genomic DNA
ttttcatattgaattgca

SEQ ID NO: 67576 - DNA, 16 bp, Homo sapiens
  source 1..16: mol_type = genomic DNA
ttttccaaggacacca

SEQ ID NO: 67577 - DNA, 17 bp, Homo sapiens
  source 1..17: mol_type = genomic DNA
ttttgcagtccttacca

SEQ ID NO: 67578 - DNA, 18 bp, Homo sapiens
  source 1..18: mol_type = genomic DNA
ttttggtgcaactccaaa

SEQ ID NO: 67579 - DNA, 20 bp, Homo sapiens
  source 1..20: mol_type = genomic DNA
ttttggtgcaactccaaata

SEQ ID NO: 67580 - DNA, 18 bp, Homo sapiens
  source 1..18: mol_type = genomic DNA
tttttcatatcattggtc

SEQ ID NO: 67581 - DNA, 19 bp, Homo sapiens
  source 1..19: mol_type = genomic DNA
tttttcatatcattggtcg

SEQ ID NO: 67582 - DNA, 20 bp, Homo sapiens
  source 1..20: mol_type = genomic DNA
tttttcatatcattggtcgt

SEQ ID NO: 67583 - DNA, 16 bp, Homo sapiens
  source 1..16: mol_type = genomic DNA
tttttccaaggacacc

SEQ ID NO: 67584 - DNA, 17 bp, Homo sapiens
  source 1..17: mol_type = genomic DNA
tttttccaaggacacca

SEQ ID NO: 67585 - DNA, 17 bp, Homo sapiens
  source 1..17: mol_type = genomic DNA
aaaaagtcatggaggcc

SEQ ID NO: 67586 - DNA, 22 bp, Homo sapiens
  source 1..22: mol_type = genomic DNA
aaaacttaaaactttacagtca

SEQ ID NO: 67587 - DNA, 17 bp, Homo sapiens
  source 1..17: mol_type = genomic DNA
aaacatcagattgtgaa

SEQ ID NO: 67588 - DNA, 22 bp, Homo sapiens
  source 1..22: mol_type = genomic DNA
aaaccgaagatcacgggttcga

SEQ ID NO: 67589 - DNA, 19 bp, Homo sapiens
  source 1..19: mol_type = genomic DNA
aaacctgccggggcttcca

SEQ ID NO: 67590 - DNA, 20 bp, Homo sapiens
  source 1..20: mol_type = genomic DNA
aaagtggctgatttgcgttc

SEQ ID NO: 67591 - DNA, 18 bp, Homo sapiens
  source 1..18: mol_type = genomic DNA
aaatctcggtggaacctc

SEQ ID NO: 67592 - DNA, 19 bp, Homo sapiens
  source 1..19: mol_type = genomic DNA
aaatctcggtgggacctcc

SEQ ID NO: 67593 - DNA, 20 bp, Homo sapiens
  source 1..20: mol_type = genomic DNA
aaatctcggtgggacctcca

SEQ ID NO: 67594 - DNA, 19 bp, Homo sapiens
  source 1..19: mol_type = genomic DNA
aaccaggggtcgcgagttc

SEQ ID NO: 67595 - DNA, 18 bp, Homo sapiens
  source 1..18: mol_type = genomic DNA
aaccccactcctggtacc

SEQ ID NO: 67596 - DNA, 19 bp, Homo sapiens
  source 1..19: mol_type = genomic DNA
aaccctgctcgctgcgcca

SEQ ID NO: 67597 - DNA, 18 bp, Homo sapiens
  source 1..18: mol_type = genomic DNA
aaccgggcagaaacacca

SEQ ID NO: 67598 - DNA, 18 bp, Homo sapiens
  source 1..18: mol_type = genomic DNA
aacctgccggggcttcca

SEQ ID NO: 67599 - DNA, 17 bp, Homo sapiens
  source 1..17: mol_type = genomic DNA
aacgaatgatttcgact

SEQ ID NO: 67600 - DNA, 17 bp, Homo sapiens
  source 1..17: mol_type = genomic DNA
aactaagtgtttgtggg

SEQ ID NO: 67601 - DNA, 20 bp, Homo sapiens
  source 1..20: mol_type = genomic DNA
aacttaaaactttacagtca

SEQ ID NO: 67602 - DNA, 21 bp, Homo sapiens
  source 1..21: mol_type = genomic DNA
aacttaaaactttacagtcag

SEQ ID NO: 67603 - DNA, 22 bp, Homo sapiens
  source 1..22: mol_type = genomic DNA
aacttaaaactttacagtcaga

SEQ ID NO: 67604 - DNA, 16 bp, Homo sapiens
  source 1..16: mol_type = genomic DNA
aagaggtccctggttc

SEQ ID NO: 67605 - DNA, 24 bp, Homo sapiens
  source 1..24: mol_type = genomic DNA
aagattccaggttcgactcctggc

SEQ ID NO: 67606 - DNA, 24 bp, Homo sapiens
  source 1..24: mol_type = genomic DNA
aagattctaggttcgactcctggc

SEQ ID NO: 67607 - DNA, 21 bp, Homo sapiens
  source 1..21: mol_type = genomic DNA
aagattgagggttcgagtccc

SEQ ID NO: 67608 - DNA, 25 bp, Homo sapiens
  source 1..25: mol_type = genomic DNA
aagcacccaacttacacttaggaga

SEQ ID NO: 67609 - DNA, 20 bp, Homo sapiens
  source 1..20: mol_type = genomic DNA
aagctatcgggcccataccc

SEQ ID NO: 67610 - DNA, 19 bp, Homo sapiens
  source 1..19: mol_type = genomic DNA
aaggctgcgtgttcgaatc

SEQ ID NO: 67611 - DNA, 25 bp, Homo sapiens
  source 1..25: mol_type = genomic DNA
aagggcttagcttaattaaagtggc

SEQ ID NO: 67612 - DNA, 24 bp, Homo sapiens
  source 1..24: mol_type = genomic DNA
aaggttgtgggttcgaatcccacc

SEQ ID NO: 67613 - DNA, 20 bp, Homo sapiens
  source 1..20: mol_type = genomic DNA
aagtcccattggtctagcca

SEQ ID NO: 67614 - DNA, 20 bp, Homo sapiens
  source 1..20: mol_type = genomic DNA
aagtccctgttcgggcgcca

SEQ ID NO: 67615 - DNA, 18 bp, Homo sapiens
  source 1..18: mol_type = genomic DNA
aagtggctgatttgcgtt

SEQ ID NO: 67616 - DNA, 20 bp, Homo sapiens
  source 1..20: mol_type = genomic DNA
aagtggctgatttgcgttca

SEQ ID NO: 67617 - DNA, 21 bp, Homo sapiens
  source 1..21: mol_type = genomic DNA
aagtggctgatttgcgttcag

SEQ ID NO: 67618 - DNA, 17 bp, Homo sapiens
  source 1..17: mol_type = genomic DNA
aagttctggtctccgga

SEQ ID NO: 67619 - DNA, 16 bp, Homo sapiens
  source 1..16: mol_type = genomic DNA
aatccagaggttccgg

SEQ ID NO: 67620 - DNA, 22 bp, Homo sapiens
  source 1..22: mol_type = genomic DNA
aatccattggggtttccccgcg

SEQ ID NO: 67621 - DNA, 23 bp, Homo sapiens
  source 1..23: mol_type = genomic DNA
aatccattggggtttccccgcgc

SEQ ID NO: 67622 - DNA, 25 bp, Homo sapiens
  source 1..25: mol_type = genomic DNA
aatccattggggtttccccgcgcag

SEQ ID NO: 67623 - DNA, 18 bp, Homo sapiens
  source 1..18: mol_type = genomic DNA
aatcccaccgctgccacc

SEQ ID NO: 67624 - DNA, 19 bp, Homo sapiens
  source 1..19: mol_type = genomic DNA
aatcccacttctgacacca

SEQ ID NO: 67625 - DNA, 19 bp, Homo sapiens
  source 1..19: mol_type = genomic DNA
aatcccagcggggcctcca

SEQ ID NO: 67626 - DNA, 17 bp, Homo sapiens
  source 1..17: mol_type = genomic DNA
aatcccagcggtgcctc

SEQ ID NO: 67627 - DNA, 20 bp, Homo sapiens
  source 1..20: mol_type = genomic DNA
aatccccggcatctccacca

SEQ ID NO: 67628 - DNA, 19 bp, Homo sapiens
  source 1..19: mol_type = genomic DNA
aatcccggacgagccccca

SEQ ID NO: 67629 - DNA, 17 bp, Homo sapiens
  source 1..17: mol_type = genomic DNA
aatccgagtcacggcac

SEQ ID NO: 67630 - DNA, 18 bp, Homo sapiens
  source 1..18: mol_type = genomic DNA
aatccggctcgaaggacc

SEQ ID NO: 67631 - DNA, 18 bp, Homo sapiens
  source 1..18: mol_type = genomic DNA
aatccggctcggaggacc

SEQ ID NO: 67632 - DNA, 19 bp, Homo sapiens
  source 1..19: mol_type = genomic DNA
aatccggctcggaggacca

SEQ ID NO: 67633 - DNA, 18 bp, Homo sapiens
  source 1..18: mol_type = genomic DNA
aatcctgccgactacgcc

SEQ ID NO: 67634 - DNA, 17 bp, Homo sapiens
  source 1..17: mol_type = genomic DNA
aatctcggtggaacctc

SEQ ID NO: 67635 - DNA, 18 bp, Homo sapiens
  source 1..18: mol_type = genomic DNA
aatctgaaggtcgtgagt

SEQ ID NO: 67636 - DNA, 22 bp, Homo sapiens
  source 1..22: mol_type = genomic DNA
aatctgaaggtcgtgagttcga

SEQ ID NO: 67637 - DNA, 25 bp, Homo sapiens
  source 1..25: mol_type = genomic DNA
aatctgacaacagaggcttacgacc

SEQ ID NO: 67638 - DNA, 20 bp, Homo sapiens
  source 1..20: mol_type = genomic DNA
aatgccgaggttgtgagttc

SEQ ID NO: 67639 - DNA, 16 bp, Homo sapiens
  source 1..16: mol_type = genomic DNA
aatggataaggcactg

SEQ ID NO: 67640 - DNA, 16 bp, Homo sapiens
  source 1..16: mol_type = genomic DNA
aatggataaggcatca

SEQ ID NO: 67641 - DNA, 18 bp, Homo sapiens
  source 1..18: mol_type = genomic DNA
aatggataaggcatcagc

SEQ ID NO: 67642 - DNA, 17 bp, Homo sapiens
  source 1..17: mol_type = genomic DNA
aatggataaggcattgg

SEQ ID NO: 67643 - DNA, 18 bp, Homo sapiens
  source 1..18: mol_type = genomic DNA
aatggataaggcattggc

SEQ ID NO: 67644 - DNA, 18 bp, Homo sapiens
  source 1..18: mol_type = genomic DNA
aatggatagcgcattgga

SEQ ID NO: 67645 - DNA, 17 bp, Homo sapiens
  source 1..17: mol_type = genomic DNA
aatggttagcactctgg

SEQ ID NO: 67646 - DNA, 20 bp, Homo sapiens
  source 1..20: mol_type = genomic DNA
aatggttagcactctggact

SEQ ID NO: 67647 - DNA, 18 bp, Homo sapiens
  source 1..18: mol_type = genomic DNA
aattctcgcctgccacgc

SEQ ID NO: 67648 - DNA, 18 bp, Homo sapiens
  source 1..18: mol_type = genomic DNA
acaacatggctttctcac

SEQ ID NO: 67649 - DNA, 20 bp, Homo sapiens
  source 1..20: mol_type = genomic DNA
acaggagatcctgggttcga

SEQ ID NO: 67650 - DNA, 22 bp, Homo sapiens
  source 1..22: mol_type = genomic DNA
acatggtctagcggttaggatt

SEQ ID NO: 67651 - DNA, 19 bp, Homo sapiens
  source 1..19: mol_type = genomic DNA
accaaaacatcagattgtg

SEQ ID NO: 67652 - DNA, 20 bp, Homo sapiens
  source 1..20: mol_type = genomic DNA
accaaaacatcagattgtga

SEQ ID NO: 67653 - DNA, 23 bp, Homo sapiens
  source 1..23: mol_type = genomic DNA
accaaaacatcagattgtgaatc

SEQ ID NO: 67654 - DNA, 25 bp, Homo sapiens
  source 1..25: mol_type = genomic DNA
accagaatggccgagtggttaaggc

SEQ ID NO: 67655 - DNA, 17 bp, Homo sapiens
  source 1..17: mol_type = genomic DNA
accaggatggccgagtg

SEQ ID NO: 67656 - DNA, 25 bp, Homo sapiens
  source 1..25: mol_type = genomic DNA
accaggatggccgagtggttaaggc

SEQ ID NO: 67657 - DNA, 16 bp, Homo sapiens
  source 1..16: mol_type = genomic DNA
accctgctcgctgcgc

SEQ ID NO: 67658 - DNA, 17 bp, Homo sapiens
  source 1..17: mol_type = genomic DNA
accctgctcgctgcgcc

SEQ ID NO: 67659 - DNA, 19 bp, Homo sapiens
  source 1..19: mol_type = genomic DNA
accgaaaggttggtggttc

SEQ ID NO: 67660 - DNA, 18 bp, Homo sapiens
  source 1..18: mol_type = genomic DNA
accgaagatcacgggttc

SEQ ID NO: 67661 - DNA, 18 bp, Homo sapiens
  source 1..18: mol_type = genomic DNA
accgaagatcgcgggttc

SEQ ID NO: 67662 - DNA, 17 bp, Homo sapiens
  source 1..17: mol_type = genomic DNA
acctcagagggggcacc

SEQ ID NO: 67663 - DNA, 16 bp, Homo sapiens
  source 1..16: mol_type = genomic DNA
acgaatgatttcgact

SEQ ID NO: 67664 - DNA, 19 bp, Homo sapiens
  source 1..19: mol_type = genomic DNA
acgcgggaggcccgggttc

SEQ ID NO: 67665 - DNA, 19 bp, Homo sapiens
  source 1..19: mol_type = genomic DNA
actcctggctggctcgcca

SEQ ID NO: 67666 - DNA, 16 bp, Homo sapiens
  source 1..16: mol_type = genomic DNA
actctggactctgaat

SEQ ID NO: 67667 - DNA, 22 bp, Homo sapiens
  source 1..22: mol_type = genomic DNA
actctggactctgaatccagcg

SEQ ID NO: 67668 - DNA, 17 bp, Homo sapiens
  source 1..17: mol_type = genomic DNA
actctggactttgaatc

SEQ ID NO: 67669 - DNA, 18 bp, Homo sapiens
  source 1..18: mol_type = genomic DNA
actctggactttgaatcc

SEQ ID NO: 67670 - DNA, 21 bp, Homo sapiens
  source 1..21: mol_type = genomic DNA
acttaaaactttacagtcaga

SEQ ID NO: 67671 - DNA, 23 bp, Homo sapiens
  source 1..23: mol_type = genomic DNA
acttacacttaggagatttcaac

SEQ ID NO: 67672 - DNA, 24 bp, Homo sapiens
  source 1..24: mol_type = genomic DNA
agaaatatgtctgataaaagagtt

SEQ ID NO: 67673 - DNA, 16 bp, Homo sapiens
  source 1..16: mol_type = genomic DNA
agaagattccaggttc

SEQ ID NO: 67674 - DNA, 17 bp, Homo sapiens
  source 1..17: mol_type = genomic DNA
agaagattccaggttcg

SEQ ID NO: 67675 - DNA, 16 bp, Homo sapiens
  source 1..16: mol_type = genomic DNA
agaagattctaggttc

SEQ ID NO: 67676 - DNA, 16 bp, Homo sapiens
  source 1..16: mol_type = genomic DNA
agaagattgagggttc

SEQ ID NO: 67677 - DNA, 24 bp, Homo sapiens
  source 1..24: mol_type = genomic DNA
agaagattgagggttcgagtccct

SEQ ID NO: 67678 - DNA, 16 bp, Homo sapiens
  source 1..16: mol_type = genomic DNA
agaaggctgcgtgttc

SEQ ID NO: 67679 - DNA, 16 bp, Homo sapiens
  source 1..16: mol_type = genomic DNA
agaaggttgcgtgttc

SEQ ID NO: 67680 - DNA, 19 bp, Homo sapiens
  source 1..19: mol_type = genomic DNA
agaggcttacgacccctta

SEQ ID NO: 67681 - DNA, 16 bp, Homo sapiens
  source 1..16: mol_type = genomic DNA
agaggtcgatggatcg

SEQ ID NO: 67682 - DNA, 16 bp, Homo sapiens
  source 1..16: mol_type = genomic DNA
agaggttccgggttcg

SEQ ID NO: 67683 - DNA, 25 bp, Homo sapiens
  source 1..25: mol_type = genomic DNA
agaggttccgggttcgagtcccggc

SEQ ID NO: 67684 - DNA, 24 bp, Homo sapiens
  source 1..24: mol_type = genomic DNA
agagtggcgcagcggaagcgtgct

SEQ ID NO: 67685 - DNA, 21 bp, Homo sapiens
  source 1..21: mol_type = genomic DNA
agatcagaaggttgcgtgttc

SEQ ID NO: 67686 - DNA, 18 bp, Homo sapiens
  source 1..18: mol_type = genomic DNA
agatcgcgggttcgaacc

SEQ ID NO: 67687 - DNA, 23 bp, Homo sapiens
  source 1..23: mol_type = genomic DNA
agattctaggttcgactcctggc

SEQ ID NO: 67688 - DNA, 21 bp, Homo sapiens
  source 1..21: mol_type = genomic DNA
agattgagggttcgaatccct

SEQ ID NO: 67689 - DNA, 18 bp, Homo sapiens
  source 1..18: mol_type = genomic DNA
agattgagggttcgagtc

SEQ ID NO: 67690 - DNA, 17 bp, Homo sapiens
  source 1..17: mol_type = genomic DNA
agcatgagactcttaat

SEQ ID NO: 67691 - DNA, 18 bp, Homo sapiens
  source 1..18: mol_type = genomic DNA
agcatgagactcttaatc

SEQ ID NO: 67692 - DNA, 20 bp, Homo sapiens
  source 1..20: mol_type = genomic DNA
agcatgagactcttaatctc

SEQ ID NO: 67693 - DNA, 16 bp, Homo sapiens
  source 1..16: mol_type = genomic DNA
agcatgggactcttaa

SEQ ID NO: 67694 - DNA, 17 bp, Homo sapiens
  source 1..17: mol_type = genomic DNA
agcatgggactcttaat

SEQ ID NO: 67695 - DNA, 18 bp, Homo sapiens
  source 1..18: mol_type = genomic DNA
agcatttgactgcagatc

SEQ ID NO: 67696 - DNA, 17 bp, Homo sapiens
  source 1..17: mol_type = genomic DNA
agccagggattgtgggt

SEQ ID NO: 67697 - DNA, 18 bp, Homo sapiens
  source 1..18: mol_type = genomic DNA
agcccacccagggacgcc

SEQ ID NO: 67698 - DNA, 22 bp, Homo sapiens
  source 1..22: mol_type = genomic DNA
agccgtgatcgtatagtggtta

SEQ ID NO: 67699 - DNA, 18 bp, Homo sapiens
  source 1..18: mol_type = genomic DNA
agcggttaggattcctgg

SEQ ID NO: 67700 - DNA, 17 bp, Homo sapiens
  source 1..17: mol_type = genomic DNA
agctcagtcggtagagc

SEQ ID NO: 67701 - DNA, 23 bp, Homo sapiens
  source 1..23: mol_type = genomic DNA
aggagatttcaacttaacttgac

SEQ ID NO: 67702 - DNA, 23 bp, Homo sapiens
  source 1..23: mol_type = genomic DNA
aggatggccgagcggtctaaggc

SEQ ID NO: 67703 - DNA, 20 bp, Homo sapiens
  source 1..20: mol_type = genomic DNA
aggatggccgagtggtctaa

SEQ ID NO: 67704 - DNA, 20 bp, Homo sapiens
  source 1..20: mol_type = genomic DNA
aggatggggtgtgataggtg

SEQ ID NO: 67705 - DNA, 20 bp, Homo sapiens
  source 1..20: mol_type = genomic DNA
aggcattggcctcctaagcc

SEQ ID NO: 67706 - DNA, 18 bp, Homo sapiens
  source 1..18: mol_type = genomic DNA
aggctgcgtgttcgaatc

SEQ ID NO: 67707 - DNA, 25 bp, Homo sapiens
  source 1..25: mol_type = genomic DNA
aggcttacgaccccttatttacccc

SEQ ID NO: 67708 - DNA, 23 bp, Homo sapiens
  source 1..23: mol_type = genomic DNA
agggattgtgggttcgagtccca

SEQ ID NO: 67709 - DNA, 25 bp, Homo sapiens
  source 1..25: mol_type = genomic DNA
agggattgtgggttcgagtcccatc

SEQ ID NO: 67710 - DNA, 21 bp, Homo sapiens
  source 1..21: mol_type = genomic DNA
agggtcgtgggttcgagcccc

SEQ ID NO: 67711 - DNA, 24 bp, Homo sapiens
  source 1..24: mol_type = genomic DNA
agggtcgtgggttcgagccccacg

SEQ ID NO: 67712 - DNA, 17 bp, Homo sapiens
  source 1..17: mol_type = genomic DNA
agggttcgagtcccttc

SEQ ID NO: 67713 - DNA, 23 bp, Homo sapiens
  source 1..23: mol_type = genomic DNA
aggtcccgggttcaaatcccgga

SEQ ID NO: 67714 - DNA, 17 bp, Homo sapiens
  source 1..17: mol_type = genomic DNA
aggtcgatggatcgaaa

SEQ ID NO: 67715 - DNA, 18 bp, Homo sapiens
  source 1..18: mol_type = genomic DNA
aggtcgatggatcgaaac

SEQ ID NO: 67716 - DNA, 19 bp, Homo sapiens
  source 1..19: mol_type = genomic DNA
aggtcgcgggttcgaaccc

SEQ ID NO: 67717 - DNA, 20 bp, Homo sapiens
  source 1..20: mol_type = genomic DNA
aggtcgcgggttcgaacccc

SEQ ID NO: 67718 - DNA, 23 bp, Homo sapiens
  source 1..23: mol_type = genomic DNA
aggtcgcgggttcgaaccccgta

SEQ ID NO: 67719 - DNA, 20 bp, Homo sapiens
  source 1..20: mol_type = genomic DNA
aggtcgcgggttcgatcccc

SEQ ID NO: 67720 - DNA, 22 bp, Homo sapiens
  source 1..22: mol_type = genomic DNA
aggtcgctggttcgattccggc

SEQ ID NO: 67721 - DNA, 20 bp, Homo sapiens
  source 1..20: mol_type = genomic DNA
aggtcgtgagttcgagcctc

SEQ ID NO: 67722 - DNA, 20 bp, Homo sapiens
  source 1..20: mol_type = genomic DNA
aggtcgtgagttcgatcctc

SEQ ID NO: 67723 - DNA, 18 bp, Homo sapiens
  source 1..18: mol_type = genomic DNA
aggtgattttcatattga

SEQ ID NO: 67724 - DNA, 22 bp, Homo sapiens
  source 1..22: mol_type = genomic DNA
aggttccgggttcgagtcccgg

SEQ ID NO: 67725 - DNA, 20 bp, Homo sapiens
  source 1..20: mol_type = genomic DNA
aggttgtgggttcgaatccc

SEQ ID NO: 67726 - DNA, 23 bp, Homo sapiens
  source 1..23: mol_type = genomic DNA
aggttgtgggttcgaatcccacc

SEQ ID NO: 67727 - DNA, 18 bp, Homo sapiens
  source 1..18: mol_type = genomic DNA
agtaaataataggagctt

SEQ ID NO: 67728 - DNA, 19 bp, Homo sapiens
  source 1..19: mol_type = genomic DNA
agtaggtagcgcatcagtc

SEQ ID NO: 67729 - DNA, 18 bp, Homo sapiens
  source 1..18: mol_type = genomic DNA
agtcacgtcggggtcacc

SEQ ID NO: 67730 - DNA, 19 bp, Homo sapiens
  source 1..19: mol_type = genomic DNA
agtcacgtcggggtcacca

SEQ ID NO: 67731 - DNA, 19 bp, Homo sapiens
  source 1..19: mol_type = genomic DNA
agtcccatctggggtgcca

SEQ ID NO: 67732 - DNA, 19 bp, Homo sapiens
  source 1..19: mol_type = genomic DNA
agtcccatctgggtcgcca

SEQ ID NO: 67733 - DNA, 18 bp, Homo sapiens
  source 1..18: mol_type = genomic DNA
agtcccggcagagatgcc

SEQ ID NO: 67734 - DNA, 19 bp, Homo sapiens
  source 1..19: mol_type = genomic DNA
agtcccggcagagatgcca

SEQ ID NO: 67735 - DNA, 19 bp, Homo sapiens
  source 1..19: mol_type = genomic DNA
agtcccggcggagtcgcca

SEQ ID NO: 67736 - DNA, 19 bp, Homo sapiens
  source 1..19: mol_type = genomic DNA
agtccctgttcgggcgcca

SEQ ID NO: 67737 - DNA, 19 bp, Homo sapiens
  source 1..19: mol_type = genomic DNA
agtcccttcgtggtcgcca

SEQ ID NO: 67738 - DNA, 23 bp, Homo sapiens
  source 1..23: mol_type = genomic DNA
agtcggtagagcatcagactttt

SEQ ID NO: 67739 - DNA, 17 bp, Homo sapiens
  source 1..17: mol_type = genomic DNA
agtggctgatttgcgtt

SEQ ID NO: 67740 - DNA, 19 bp, Homo sapiens
  source 1..19: mol_type = genomic DNA
agtggctgatttgcgttca

SEQ ID NO: 67741 - DNA, 20 bp, Homo sapiens
  source 1..20: mol_type = genomic DNA
agtggctgatttgcgttcag

SEQ ID NO: 67742 - DNA, 17 bp, Homo sapiens
  source 1..17: mol_type = genomic DNA
agtggggttttgcagtc

SEQ ID NO: 67743 - DNA, 24 bp, Homo sapiens
  source 1..24: mol_type = genomic DNA
agtggggttttgcagtccttacca

SEQ ID NO: 67744 - DNA, 16 bp, Homo sapiens
  source 1..16: mol_type = genomic DNA
agtggtagaattctcg

SEQ ID NO: 67745 - DNA, 18 bp, Homo sapiens
  source 1..18: mol_type = genomic DNA
agtggtagagcatttgac

SEQ ID NO: 67746 - DNA, 17 bp, Homo sapiens
  source 1..17: mol_type = genomic DNA
agtggtagagcgcatgc

SEQ ID NO: 67747 - DNA, 20 bp, Homo sapiens
  source 1..20: mol_type = genomic DNA
agtggtatcatgcaagattc

SEQ ID NO: 67748 - DNA, 21 bp, Homo sapiens
  source 1..21: mol_type = genomic DNA
agtggtatcatgcaagattcc

SEQ ID NO: 67749 - DNA, 22 bp, Homo sapiens
  source 1..22: mol_type = genomic DNA
agtggttaggattcggcgctct

SEQ ID NO: 67750 - DNA, 19 bp, Homo sapiens
  source 1..19: mol_type = genomic DNA
agtggttagtactctgcgt

SEQ ID NO: 67751 - DNA, 17 bp, Homo sapiens
  source 1..17: mol_type = genomic DNA
agtggttatcacgttcg

SEQ ID NO: 67752 - DNA, 24 bp, Homo sapiens
  source 1..24: mol_type = genomic DNA
agttcaaatctcggtggaacctcc

SEQ ID NO: 67753 - DNA, 18 bp, Homo sapiens
  source 1..18: mol_type = genomic DNA
agttggtagagcatcaga

SEQ ID NO: 67754 - DNA, 19 bp, Homo sapiens
  source 1..19: mol_type = genomic DNA
agttggtagagcatcagac

SEQ ID NO: 67755 - DNA, 18 bp, Homo sapiens
  source 1..18: mol_type = genomic DNA
ataacccagaggtcgatg

SEQ ID NO: 67756 - DNA, 18 bp, Homo sapiens
  source 1..18: mol_type = genomic DNA
atacaacgatggtttttc

SEQ ID NO: 67757 - DNA, 18 bp, Homo sapiens
  source 1..18: mol_type = genomic DNA
atacccttcccgtactac

SEQ ID NO: 67758 - DNA, 21 bp, Homo sapiens
  source 1..21: mol_type = genomic DNA
atagctgccttccaagcagtt

SEQ ID NO: 67759 - DNA, 16 bp, Homo sapiens
  source 1..16: mol_type = genomic DNA
atcacgtcggggtcac

SEQ ID NO: 67760 - DNA, 19 bp, Homo sapiens
  source 1..19: mol_type = genomic DNA
atcagaagattccaggttc

SEQ ID NO: 67761 - DNA, 17 bp, Homo sapiens
  source 1..17: mol_type = genomic DNA
atccagcgatccgagtt

SEQ ID NO: 67762 - DNA, 17 bp, Homo sapiens
  source 1..17: mol_type = genomic DNA
atccaggtgccccctcc

SEQ ID NO: 67763 - DNA, 18 bp, Homo sapiens
  source 1..18: mol_type = genomic DNA
atcccaccagagtcgcca

SEQ ID NO: 67764 - DNA, 19 bp, Homo sapiens
  source 1..19: mol_type = genomic DNA
atcccacccagggacgcca

SEQ ID NO: 67765 - DNA, 16 bp, Homo sapiens
  source 1..16: mol_type = genomic DNA
atcccacttctgacac

SEQ ID NO: 67766 - DNA, 17 bp, Homo sapiens
  source 1..17: mol_type = genomic DNA
atcccagtagagcctcc

SEQ ID NO: 67767 - DNA, 18 bp, Homo sapiens
  source 1..18: mol_type = genomic DNA
atccccggcatctccacc

SEQ ID NO: 67768 - DNA, 18 bp, Homo sapiens
  source 1..18: mol_type = genomic DNA
atcccttcgtggttgcca

SEQ ID NO: 67769 - DNA, 16 bp, Homo sapiens
  source 1..16: mol_type = genomic DNA
atccggctcgaaggac

SEQ ID NO: 67770 - DNA, 19 bp, Homo sapiens
  source 1..19: mol_type = genomic DNA
atcctcacacggggcacca

SEQ ID NO: 67771 - DNA, 16 bp, Homo sapiens
  source 1..16: mol_type = genomic DNA
atcctgccgactacgc

SEQ ID NO: 67772 - DNA, 17 bp, Homo sapiens
  source 1..17: mol_type = genomic DNA
atcctgctcacagcgcc

SEQ ID NO: 67773 - DNA, 18 bp, Homo sapiens
  source 1..18: mol_type = genomic DNA
atcctgtcggctacgcca

SEQ ID NO: 67774 - DNA, 19 bp, Homo sapiens
  source 1..19: mol_type = genomic DNA
atctgaaggtcgtgagttc

SEQ ID NO: 67775 - DNA, 16 bp, Homo sapiens
  source 1..16: mol_type = genomic DNA
atctgacaacagaggc

SEQ ID NO: 67776 - DNA, 18 bp, Homo sapiens
  source 1..18: mol_type = genomic DNA
atctgacaacagaggctt

SEQ ID NO: 67777 - DNA, 19 bp, Homo sapiens
  source 1..19: mol_type = genomic DNA
atctgacaacagaggctta

SEQ ID NO: 67778 - DNA, 22 bp, Homo sapiens
  source 1..22: mol_type = genomic DNA
atctgacaacagaggcttacga

SEQ ID NO: 67779 - DNA, 19 bp, Homo sapiens
  source 1..19: mol_type = genomic DNA
atctgagggtccagggttt

SEQ ID NO: 67780 - DNA, 16 bp, Homo sapiens
  source 1..16: mol_type = genomic DNA
atgagactcttaatct

SEQ ID NO: 67781 - DNA, 16 bp, Homo sapiens
  source 1..16: mol_type = genomic DNA
atgaggccccgggttc

SEQ ID NO: 67782 - DNA, 16 bp, Homo sapiens
  source 1..16: mol_type = genomic DNA
atgaggtcccgggttc

SEQ ID NO: 67783 - DNA, 19 bp, Homo sapiens
  source 1..19: mol_type = genomic DNA
atggataacgcgtctgact

SEQ ID NO: 67784 - DNA, 17 bp, Homo sapiens
  source 1..17: mol_type = genomic DNA
atggataaggcactggc

SEQ ID NO: 67785 - DNA, 17 bp, Homo sapiens
  source 1..17: mol_type = genomic DNA
atggataaggcatcagc

SEQ ID NO: 67786 - DNA, 20 bp, Homo sapiens
  source 1..20: mol_type = genomic DNA
atggataaggcatcagcctc

SEQ ID NO: 67787 - DNA, 16 bp, Homo sapiens
  source 1..16: mol_type = genomic DNA
atggataaggcattgg

SEQ ID NO: 67788 - DNA, 17 bp, Homo sapiens
  source 1..17: mol_type = genomic DNA
atggataaggcattggc

SEQ ID NO: 67789 - DNA, 18 bp, Homo sapiens
  source 1..18: mol_type = genomic DNA
atggataaggcattggcc

SEQ ID NO: 67790 - DNA, 17 bp, Homo sapiens
  source 1..17: mol_type = genomic DNA
atggatagcgcattgga

SEQ ID NO: 67791 - DNA, 18 bp, Homo sapiens
  source 1..18: mol_type = genomic DNA
atggccgagcggtctaag

SEQ ID NO: 67792 - DNA, 16 bp, Homo sapiens
  source 1..16: mol_type = genomic DNA
atgggactcttaatcc

SEQ ID NO: 67793 - DNA, 17 bp, Homo sapiens
  source 1..17: mol_type = genomic DNA
atggtgtaatggttagc

SEQ ID NO: 67794 - DNA, 18 bp, Homo sapiens
  source 1..18: mol_type = genomic DNA
atgttggttatacccttc

SEQ ID NO: 67795 - DNA, 20 bp, Homo sapiens
  source 1..20: mol_type = genomic DNA
attagctcaaatggtagagc

SEQ ID NO: 67796 - DNA, 21 bp, Homo sapiens
  source 1..21: mol_type = genomic DNA
attccaggttcgactcctggc

SEQ ID NO: 67797 - DNA, 18 bp, Homo sapiens
  source 1..18: mol_type = genomic DNA
attccccgacggggagcc

SEQ ID NO: 67798 - DNA, 18 bp, Homo sapiens
  source 1..18: mol_type = genomic DNA
attcccggccaatgcacc

SEQ ID NO: 67799 - DNA, 16 bp, Homo sapiens
  source 1..16: mol_type = genomic DNA
attcccgggcggcgca

SEQ ID NO: 67800 - DNA, 18 bp, Homo sapiens
  source 1..18: mol_type = genomic DNA
attccttccttttttgcc

SEQ ID NO: 67801 - DNA, 19 bp, Homo sapiens
  source 1..19: mol_type = genomic DNA
attcggcgctctcaccgcc

SEQ ID NO: 67802 - DNA, 21 bp, Homo sapiens
  source 1..21: mol_type = genomic DNA
attctaggttcgactcctggc

SEQ ID NO: 67803 - DNA, 19 bp, Homo sapiens
  source 1..19: mol_type = genomic DNA
attctcatagtcctagcca

SEQ ID NO: 67804 - DNA, 18 bp, Homo sapiens
  source 1..18: mol_type = genomic DNA
attcttgcgacccgggtt

SEQ ID NO: 67805 - DNA, 21 bp, Homo sapiens
  source 1..21: mol_type = genomic DNA
attcttgcgacccgggttcga

SEQ ID NO: 67806 - DNA, 22 bp, Homo sapiens
  source 1..22: mol_type = genomic DNA
attcttgcgacccgggttcgat

SEQ ID NO: 67807 - DNA, 23 bp, Homo sapiens
  source 1..23: mol_type = genomic DNA
attcttgcgacccgggttcgatt

SEQ ID NO: 67808 - DNA, 18 bp, Homo sapiens
  source 1..18: mol_type = genomic DNA
attgagggttcgaatccc

SEQ ID NO: 67809 - DNA, 19 bp, Homo sapiens
  source 1..19: mol_type = genomic DNA
attgagggttcgaatccct

SEQ ID NO: 67810 - DNA, 21 bp, Homo sapiens
  source 1..21: mol_type = genomic DNA
attgagggttcgagtcccttc

SEQ ID NO: 67811 - DNA, 18 bp, Homo sapiens
  source 1..18: mol_type = genomic DNA
attggggtttccccgcgc

SEQ ID NO: 67812 - DNA, 22 bp, Homo sapiens
  source 1..22: mol_type = genomic DNA
attgtgaatctgacaacagagg

SEQ ID NO: 67813 - DNA, 24 bp, Homo sapiens
  source 1..24: mol_type = genomic DNA
attgtgaatctgacaacagaggct

SEQ ID NO: 67814 - DNA, 25 bp, Homo sapiens
  source 1..25: mol_type = genomic DNA
attgtgaatctgacaacagaggctt

SEQ ID NO: 67815 - DNA, 18 bp, Homo sapiens
  source 1..18: mol_type = genomic DNA
attgtgggttcgagtccc

SEQ ID NO: 67816 - DNA, 19 bp, Homo sapiens
  source 1..19: mol_type = genomic DNA
attgtgggttcgagtccca

SEQ ID NO: 67817 - DNA, 21 bp, Homo sapiens
  source 1..21: mol_type = genomic DNA
attgtgggttcgagtcccatc

SEQ ID NO: 67818 - DNA, 24 bp, Homo sapiens
  source 1..24: mol_type = genomic DNA
caaagcacccaacttacacttagg

SEQ ID NO: 67819 - DNA, 20 bp, Homo sapiens
  source 1..20: mol_type = genomic DNA
caaatccgggtgccccctcc

SEQ ID NO: 67820 - DNA, 19 bp, Homo sapiens
  source 1..19: mol_type = genomic DNA
caaatctcggtggaacctc

SEQ ID NO: 67821 - DNA, 20 bp, Homo sapiens
  source 1..20: mol_type = genomic DNA
caaatctcggtgggacctcc

SEQ ID NO: 67822 - DNA, 21 bp, Homo sapiens
  source 1..21: mol_type = genomic DNA
caaatctcggtgggacctcca

SEQ ID NO: 67823 - DNA, 18 bp, Homo sapiens
  source 1..18: mol_type = genomic DNA
caaattcgaagaagcagc

SEQ ID NO: 67824 - DNA, 21 bp, Homo sapiens
  source 1..21: mol_type = genomic DNA
caaattcgaagaagcagcttc

SEQ ID NO: 67825 - DNA, 17 bp, Homo sapiens
  source 1..17: mol_type = genomic DNA
caacatggctttctcac

SEQ ID NO: 67826 - DNA, 18 bp, Homo sapiens
  source 1..18: mol_type = genomic DNA
caactccaaataaaagta

SEQ ID NO: 67827 - DNA, 25 bp, Homo sapiens
  source 1..25: mol_type = genomic DNA
caacttacacttaggagatttcaac

SEQ ID NO: 67828 - DNA, 17 bp, Homo sapiens
  source 1..17: mol_type = genomic DNA
caagaggtccctggttc

SEQ ID NO: 67829 - DNA, 21 bp, Homo sapiens
  source 1..21: mol_type = genomic DNA
caatccccggcacctccacca

SEQ ID NO: 67830 - DNA, 21 bp, Homo sapiens
  source 1..21: mol_type = genomic DNA
caatccccggcatctccacca

SEQ ID NO: 67831 - DNA, 16 bp, Homo sapiens
  source 1..16: mol_type = genomic DNA
caatggatagcgcatt

SEQ ID NO: 67832 - DNA, 19 bp, Homo sapiens
  source 1..19: mol_type = genomic DNA
caatggatagcgcattgga

SEQ ID NO: 67833 - DNA, 19 bp, Homo sapiens
  source 1..19: mol_type = genomic DNA
cacgcgaaaggtccccggt

SEQ ID NO: 67834 - DNA, 16 bp, Homo sapiens
  source 1..16: mol_type = genomic DNA
cacgcgggagaccggg

SEQ ID NO: 67835 - DNA, 16 bp, Homo sapiens
  source 1..16: mol_type = genomic DNA
cacgcgggaggcccgg

SEQ ID NO: 67836 - DNA, 22 bp, Homo sapiens
  source 1..22: mol_type = genomic DNA
cactctggactctgaatccagc

SEQ ID NO: 67837 - DNA, 18 bp, Homo sapiens
  source 1..18: mol_type = genomic DNA
cactctggactttgaatc

SEQ ID NO: 67838 - DNA, 17 bp, Homo sapiens
  source 1..17: mol_type = genomic DNA
cagaagattccaggttc

SEQ ID NO: 67839 - DNA, 17 bp, Homo sapiens
  source 1..17: mol_type = genomic DNA
cagaagattctaggttc

SEQ ID NO: 67840 - DNA, 17 bp, Homo sapiens
  source 1..17: mol_type = genomic DNA
cagaagattgagggttc

SEQ ID NO: 67841 - DNA, 17 bp, Homo sapiens
  source 1..17: mol_type = genomic DNA
cagaaggctgcgtgttc

SEQ ID NO: 67842 - DNA, 17 bp, Homo sapiens
  source 1..17: mol_type = genomic DNA
cagaaggttgcgtgttc

SEQ ID NO: 67843 - DNA, 20 bp, Homo sapiens
  source 1..20: mol_type = genomic DNA
cagagcccggtaatcgcata

SEQ ID NO: 67844 - DNA, 17 bp, Homo sapiens
  source 1..17: mol_type = genomic DNA
cagaggttccgggttcg

SEQ ID NO: 67845 - DNA, 24 bp, Homo sapiens
  source 1..24: mol_type = genomic DNA
cagagtggcgcagcggaagcgtgc

SEQ ID NO: 67846 - DNA, 25 bp, Homo sapiens
  source 1..25: mol_type = genomic DNA
cagcaacctcggttcgaatccgagt

SEQ ID NO: 67847 - DNA, 22 bp, Homo sapiens
  source 1..22: mol_type = genomic DNA
caggatggccgagcggtctaag

SEQ ID NO: 67848 - DNA, 17 bp, Homo sapiens
  source 1..17: mol_type = genomic DNA
cagggattgtgggttcg

SEQ ID NO: 67849 - DNA, 17 bp, Homo sapiens
  source 1..17: mol_type = genomic DNA
caggggtcgcgagttca

SEQ ID NO: 67850 - DNA, 17 bp, Homo sapiens
  source 1..17: mol_type = genomic DNA
caggttcgactcctggc

SEQ ID NO: 67851 - DNA, 17 bp, Homo sapiens
  source 1..17: mol_type = genomic DNA
caggttcgagtcctgcc

SEQ ID NO: 67852 - DNA, 16 bp, Homo sapiens
  source 1..16: mol_type = genomic DNA
cagtcagtagagcatc

SEQ ID NO: 67853 - DNA, 16 bp, Homo sapiens
  source 1..16: mol_type = genomic DNA
cagtgggtagagcatc

SEQ ID NO: 67854 - DNA, 20 bp, Homo sapiens
  source 1..20: mol_type = genomic DNA
cagtggtagagcatttgact

SEQ ID NO: 67855 - DNA, 17 bp, Homo sapiens
  source 1..17: mol_type = genomic DNA
cataactttgtcaaagt

SEQ ID NO: 67856 - DNA, 16 bp, Homo sapiens
  source 1..16: mol_type = genomic DNA
cataatctgaaggtcc

SEQ ID NO: 67857 - DNA, 18 bp, Homo sapiens
  source 1..18: mol_type = genomic DNA
cataatctgaaggtcctg

SEQ ID NO: 67858 - DNA, 18 bp, Homo sapiens
  source 1..18: mol_type = genomic DNA
cataatctgaaggtcgtg

SEQ ID NO: 67859 - DNA, 21 bp, Homo sapiens
  source 1..21: mol_type = genomic DNA
cataatctgaaggtcgtgagt

SEQ ID NO: 67860 - DNA, 17 bp, Homo sapiens
  source 1..17: mol_type = genomic DNA
catattgaattgcaaat

SEQ ID NO: 67861 - DNA, 19 bp, Homo sapiens
  source 1..19: mol_type = genomic DNA
catgcaagattcccattct

SEQ ID NO: 67862 - DNA, 23 bp, Homo sapiens
  source 1..23: mol_type = genomic DNA
cattaaattatgataatcatatt

SEQ ID NO: 67863 - DNA, 17 bp, Homo sapiens
  source 1..17: mol_type = genomic DNA
cattcttgcgacccggg

SEQ ID NO: 67864 - DNA, 23 bp, Homo sapiens
  source 1..23: mol_type = genomic DNA
cattggggtttccccgcgcaggt

SEQ ID NO: 67865 - DNA, 17 bp, Homo sapiens
  source 1..17: mol_type = genomic DNA
ccaaggtcgcgggttcg

SEQ ID NO: 67866 - DNA, 16 bp, Homo sapiens
  source 1..16: mol_type = genomic DNA
ccagaggtcgatggat

SEQ ID NO: 67867 - DNA, 16 bp, Homo sapiens
  source 1..16: mol_type = genomic DNA
ccaggcggaaacacca

SEQ ID NO: 67868 - DNA, 17 bp, Homo sapiens
  source 1..17: mol_type = genomic DNA
cccagaggtcgatggat

SEQ ID NO: 67869 - DNA, 16 bp, Homo sapiens
  source 1..16: mol_type = genomic DNA
cccagcatctccacca

SEQ ID NO: 67870 - DNA, 18 bp, Homo sapiens
  source 1..18: mol_type = genomic DNA
cccagggtcgtgggttcg

SEQ ID NO: 67871 - DNA, 16 bp, Homo sapiens
  source 1..16: mol_type = genomic DNA
cccagtagagcctcca

SEQ ID NO: 67872 - DNA, 16 bp, Homo sapiens
  source 1..16: mol_type = genomic DNA
cccatctggggtgcca

SEQ ID NO: 67873 - DNA, 16 bp, Homo sapiens
  source 1..16: mol_type = genomic DNA
cccatctgggtcgcca

SEQ ID NO: 67874 - DNA, 16 bp, Homo sapiens
  source 1..16: mol_type = genomic DNA
ccccagtggaaccacc

SEQ ID NO: 67875 - DNA, 20 bp, Homo sapiens
  source 1..20: mol_type = genomic DNA
ccccgggttcaatccccggc

SEQ ID NO: 67876 - DNA, 16 bp, Homo sapiens
  source 1..16: mol_type = genomic DNA
ccccgtccgtgcctcc

SEQ ID NO: 67877 - DNA, 17 bp, Homo sapiens
  source 1..17: mol_type = genomic DNA
ccccgtccgtgcctcca

SEQ ID NO: 67878 - DNA, 22 bp, Homo sapiens
  source 1..22: mol_type = genomic DNA
cccgaaaatgttggttataccc

SEQ ID NO: 67879 - DNA, 20 bp, Homo sapiens
  source 1..20: mol_type = genomic DNA
cccggatagctcagtcggta

SEQ ID NO: 67880 - DNA, 16 bp, Homo sapiens
  source 1..16: mol_type = genomic DNA
cccgtccgtgcctcca

SEQ ID NO: 67881 - DNA, 16 bp, Homo sapiens
  source 1..16: mol_type = genomic DNA
ccgaagatcacgggtt

SEQ ID NO: 67882 - DNA, 17 bp, Homo sapiens
  source 1..17: mol_type = genomic DNA
ccgaagatcacgggttc

SEQ ID NO: 67883 - DNA, 18 bp, Homo sapiens
  source 1..18: mol_type = genomic DNA
ccgaagatcacgggttcg

SEQ ID NO: 67884 - DNA, 16 bp, Homo sapiens
  source 1..16: mol_type = genomic DNA
ccgaagatcgcgggtt

SEQ ID NO: 67885 - DNA, 23 bp, Homo sapiens
  source 1..23: mol_type = genomic DNA
ccggagatgaaaacctttttcca

SEQ ID NO: 67886 - DNA, 18 bp, Homo sapiens
  source 1..18: mol_type = genomic DNA
ccggatcagaagattgag

SEQ ID NO: 67887 - DNA, 19 bp, Homo sapiens
  source 1..19: mol_type = genomic DNA
ccggatcagaagattgagg

SEQ ID NO: 67888 - DNA, 16 bp, Homo sapiens
  source 1..16: mol_type = genomic DNA
ccgggcagaagcacca

SEQ ID NO: 67889 - DNA, 16 bp, Homo sapiens
  source 1..16: mol_type = genomic DNA
ccggtaatcgcataaa

SEQ ID NO: 67890 - DNA, 17 bp, Homo sapiens
  source 1..17: mol_type = genomic DNA
ccggtaatcgcataaaa

SEQ ID NO: 67891 - DNA, 17 bp, Homo sapiens
  source 1..17: mol_type = genomic DNA
ccggttcaaatccgggt

SEQ ID NO: 67892 - DNA, 23 bp, Homo sapiens
  source 1..23: mol_type = genomic DNA
ccggttcgaaaccgggcggaaac

SEQ ID NO: 67893 - DNA, 17 bp, Homo sapiens
  source 1..17: mol_type = genomic DNA
ccgttaacttccaatta

SEQ ID NO: 67894 - DNA, 19 bp, Homo sapiens
  source 1..19: mol_type = genomic DNA
cctaagccagggattgtgg

SEQ ID NO: 67895 - DNA, 16 bp, Homo sapiens
  source 1..16: mol_type = genomic DNA
cctcacacggggcacc

SEQ ID NO: 67896 - DNA, 16 bp, Homo sapiens
  source 1..16: mol_type = genomic DNA
cctcagagggggcacc

SEQ ID NO: 67897 - DNA, 19 bp, Homo sapiens
  source 1..19: mol_type = genomic DNA
cctcctcaaagcaatacac

SEQ ID NO: 67898 - DNA, 16 bp, Homo sapiens
  source 1..16: mol_type = genomic DNA
cctcgtggcgcaatgg

SEQ ID NO: 67899 - DNA, 16 bp, Homo sapiens
  source 1..16: mol_type = genomic DNA
cctgccgcggtcgcca

SEQ ID NO: 67900 - DNA, 16 bp, Homo sapiens
  source 1..16: mol_type = genomic DNA
cctggtggtctagtgg

SEQ ID NO: 67901 - DNA, 21 bp, Homo sapiens
  source 1..21: mol_type = genomic DNA
cctggtggtctagtggttagg

SEQ ID NO: 67902 - DNA, 17 bp, Homo sapiens
  source 1..17: mol_type = genomic DNA
cctgtcacgcgggagac

SEQ ID NO: 67903 - DNA, 18 bp, Homo sapiens
  source 1..18: mol_type = genomic DNA
cctgtcacgcgggagacc

SEQ ID NO: 67904 - DNA, 19 bp, Homo sapiens
  source 1..19: mol_type = genomic DNA
cctgtcacgcgggagaccg

SEQ ID NO: 67905 - DNA, 16 bp, Homo sapiens
  source 1..16: mol_type = genomic DNA
cctttttccaaggaca

SEQ ID NO: 67906 - DNA, 19 bp, Homo sapiens
  source 1..19: mol_type = genomic DNA
cgaaaccgggcggaaacac

SEQ ID NO: 67907 - DNA, 17 bp, Homo sapiens
  source 1..17: mol_type = genomic DNA
cgaaaggttggtggttc

SEQ ID NO: 67908 - DNA, 16 bp, Homo sapiens
  source 1..16: mol_type = genomic DNA
cgaagatcacgggttc

SEQ ID NO: 67909 - DNA, 16 bp, Homo sapiens
  source 1..16: mol_type = genomic DNA
cgaagatcgcgggttc

SEQ ID NO: 67910 - DNA, 21 bp, Homo sapiens
  source 1..21: mol_type = genomic DNA
cgaatcccactcctgacacca

SEQ ID NO: 67911 - DNA, 20 bp, Homo sapiens
  source 1..20: mol_type = genomic DNA
cgaatcccagcggggcctcc

SEQ ID NO: 67912 - DNA, 19 bp, Homo sapiens
  source 1..19: mol_type = genomic DNA
cgaatcccagcggtgcctc

SEQ ID NO: 67913 - DNA, 21 bp, Homo sapiens
  source 1..21: mol_type = genomic DNA
cgaatcccagcggtgcctcca

SEQ ID NO: 67914 - DNA, 20 bp, Homo sapiens
  source 1..20: mol_type = genomic DNA
cgaatcccatcctcgtcgcc

SEQ ID NO: 67915 - DNA, 17 bp, Homo sapiens
  source 1..17: mol_type = genomic DNA
cgaatccgagtcacggc

SEQ ID NO: 67916 - DNA, 20 bp, Homo sapiens
  source 1..20: mol_type = genomic DNA
cgaatccggctcgaaggacc

SEQ ID NO: 67917 - DNA, 16 bp, Homo sapiens
  source 1..16: mol_type = genomic DNA
cgaatgatttcgactc

SEQ ID NO: 67918 - DNA, 18 bp, Homo sapiens
  source 1..18: mol_type = genomic DNA
cgactcccggtgtgggaa

SEQ ID NO: 67919 - DNA, 22 bp, Homo sapiens
  source 1..22: mol_type = genomic DNA
cgagaaagctcacaagaactgc

SEQ ID NO: 67920 - DNA, 17 bp, Homo sapiens
  source 1..17: mol_type = genomic DNA
cgagaggtagcgggatc

SEQ ID NO: 67921 - DNA, 20 bp, Homo sapiens
  source 1..20: mol_type = genomic DNA
cgagccccagtggaaccacc

SEQ ID NO: 67922 - DNA, 21 bp, Homo sapiens
  source 1..21: mol_type = genomic DNA
cgagtcccggcagagatgcca

SEQ ID NO: 67923 - DNA, 21 bp, Homo sapiens
  source 1..21: mol_type = genomic DNA
cgagtcccggcggagtcgcca

SEQ ID NO: 67924 - DNA, 20 bp, Homo sapiens
  source 1..20: mol_type = genomic DNA
cgagtcccttcgtggtcgcc

SEQ ID NO: 67925 - DNA, 20 bp, Homo sapiens
  source 1..20: mol_type = genomic DNA
cgagtctcggtggaacctcc

SEQ ID NO: 67926 - DNA, 20 bp, Homo sapiens
  source 1..20: mol_type = genomic DNA
cgatccccagcatctccacc

SEQ ID NO: 67927 - DNA, 21 bp, Homo sapiens
  source 1..21: mol_type = genomic DNA
cgatccccagcatctccacca

SEQ ID NO: 67928 - DNA, 20 bp, Homo sapiens
  source 1..20: mol_type = genomic DNA
cgatccccggcatctccacc

SEQ ID NO: 67929 - DNA, 18 bp, Homo sapiens
  source 1..18: mol_type = genomic DNA
cgatcccgggtttcggca

SEQ ID NO: 67930 - DNA, 21 bp, Homo sapiens
  source 1..21: mol_type = genomic DNA
cgatcccgggtttcggcacca

SEQ ID NO: 67931 - DNA, 21 bp, Homo sapiens
  source 1..21: mol_type = genomic DNA
cgatgcccgcatcctccacca

SEQ ID NO: 67932 - DNA, 18 bp, Homo sapiens
  source 1..18: mol_type = genomic DNA
cgattcccggccaacgca

SEQ ID NO: 67933 - DNA, 21 bp, Homo sapiens
  source 1..21: mol_type = genomic DNA
cgattcccggccaatgcacca

SEQ ID NO: 67934 - DNA, 18 bp, Homo sapiens
  source 1..18: mol_type = genomic DNA
cgattcccgggcggcgca

SEQ ID NO: 67935 - DNA, 20 bp, Homo sapiens
  source 1..20: mol_type = genomic DNA
cgattcccgggcggcgcacc

SEQ ID NO: 67936 - DNA, 19 bp, Homo sapiens
  source 1..19: mol_type = genomic DNA
cgattcccggtcagggaac

SEQ ID NO: 67937 - DNA, 21 bp, Homo sapiens
  source 1..21: mol_type = genomic DNA
cgattcccggtcagggaacca

SEQ ID NO: 67938 - DNA, 20 bp, Homo sapiens
  source 1..20: mol_type = genomic DNA
cgattccttccttttttgcc

SEQ ID NO: 67939 - DNA, 21 bp, Homo sapiens
  source 1..21: mol_type = genomic DNA
cgattccttccttttttgcca

SEQ ID NO: 67940 - DNA, 17 bp, Homo sapiens
  source 1..17: mol_type = genomic DNA
cgccgcggcccgggttc

SEQ ID NO: 67941 - DNA, 18 bp, Homo sapiens
  source 1..18: mol_type = genomic DNA
cgcgaaaggtccccggtt

SEQ ID NO: 67942 - DNA, 19 bp, Homo sapiens
  source 1..19: mol_type = genomic DNA
cgcgaaaggtccccggttc

SEQ ID NO: 67943 - DNA, 20 bp, Homo sapiens
  source 1..20: mol_type = genomic DNA
cgcgaaaggtccccggttcg

SEQ ID NO: 67944 - DNA, 18 bp, Homo sapiens
  source 1..18: mol_type = genomic DNA
cgcgggaggcccgggttc

SEQ ID NO: 67945 - DNA, 19 bp, Homo sapiens
  source 1..19: mol_type = genomic DNA
cggaagcgtgctgggccca

SEQ ID NO: 67946 - DNA, 25 bp, Homo sapiens
  source 1..25: mol_type = genomic DNA
cggaagcgtgctgggcccataaccc

SEQ ID NO: 67947 - DNA, 16 bp, Homo sapiens
  source 1..16: mol_type = genomic DNA
cggagctggggattgt

SEQ ID NO: 67948 - DNA, 17 bp, Homo sapiens
  source 1..17: mol_type = genomic DNA
cggatagctcagtcggt

SEQ ID NO: 67949 - DNA, 21 bp, Homo sapiens
  source 1..21: mol_type = genomic DNA
cggatagctcagtcggtagag

SEQ ID NO: 67950 - DNA, 19 bp, Homo sapiens
  source 1..19: mol_type = genomic DNA
cggatcagaagattccagg

SEQ ID NO: 67951 - DNA, 18 bp, Homo sapiens
  source 1..18: mol_type = genomic DNA
cggatcagaagattgagg

SEQ ID NO: 67952 - DNA, 20 bp, Homo sapiens
  source 1..20: mol_type = genomic DNA
cggatcagaagattgagggt

SEQ ID NO: 67953 - DNA, 20 bp, Homo sapiens
  source 1..20: mol_type = genomic DNA
cggccgcgtggcctaatgga

SEQ ID NO: 67954 - DNA, 22 bp, Homo sapiens
  source 1..22: mol_type = genomic DNA
cggctagctcagtcggtagagc

SEQ ID NO: 67955 - DNA, 16 bp, Homo sapiens
  source 1..16: mol_type = genomic DNA
cgggaggcccgggttc

SEQ ID NO: 67956 - DNA, 17 bp, Homo sapiens
  source 1..17: mol_type = genomic DNA
cgggtgcgagaggtccc

SEQ ID NO: 67957 - DNA, 17 bp, Homo sapiens
  source 1..17: mol_type = genomic DNA
cgggttcgagtcccggc

SEQ ID NO: 67958 - DNA, 17 bp, Homo sapiens
  source 1..17: mol_type = genomic DNA
cgggttcgattcccggc

SEQ ID NO: 67959 - DNA, 17 bp, Homo sapiens
  source 1..17: mol_type = genomic DNA
cgggttcgattcccggg

SEQ ID NO: 67960 - DNA, 16 bp, Homo sapiens
  source 1..16: mol_type = genomic DNA
cggtaatcgcataaaa

SEQ ID NO: 67961 - DNA, 22 bp, Homo sapiens
  source 1..22: mol_type = genomic DNA
cggtaatcgcataaaacttaaa

SEQ ID NO: 67962 - DNA, 23 bp, Homo sapiens
  source 1..23: mol_type = genomic DNA
cggtaatcgcataaaacttaaaa

SEQ ID NO: 67963 - DNA, 16 bp, Homo sapiens
  source 1..16: mol_type = genomic DNA
cggtagagcatgagac

SEQ ID NO: 67964 - DNA, 17 bp, Homo sapiens
  source 1..17: mol_type = genomic DNA
cggtagagcatgagact

SEQ ID NO: 67965 - DNA, 16 bp, Homo sapiens
  source 1..16: mol_type = genomic DNA
cggtagagcatgggac

SEQ ID NO: 67966 - DNA, 17 bp, Homo sapiens
  source 1..17: mol_type = genomic DNA
cggtagagcatgggact

SEQ ID NO: 67967 - DNA, 25 bp, Homo sapiens
  source 1..25: mol_type = genomic DNA
cggtagagcatgggactcttaatcc

SEQ ID NO: 67968 - DNA, 22 bp, Homo sapiens
  source 1..22: mol_type = genomic DNA
cggttcgaaaccgggcggaaac

SEQ ID NO: 67969 - DNA, 23 bp, Homo sapiens
  source 1..23: mol_type = genomic DNA
cggttcgaatccgagtcacggca

SEQ ID NO: 67970 - DNA, 25 bp, Homo sapiens
  source 1..25: mol_type = genomic DNA
cggttcgaatccgagtcacggcacc

SEQ ID NO: 67971 - DNA, 17 bp, Homo sapiens
  source 1..17: mol_type = genomic DNA
cgtagtgtagtggttat

SEQ ID NO: 67972 - DNA, 18 bp, Homo sapiens
  source 1..18: mol_type = genomic DNA
cgtagtgtagtggttatc

SEQ ID NO: 67973 - DNA, 18 bp, Homo sapiens
  source 1..18: mol_type = genomic DNA
cgtatagtggttagtact

SEQ ID NO: 67974 - DNA, 19 bp, Homo sapiens
  source 1..19: mol_type = genomic DNA
cgtatagtggttagtactc

SEQ ID NO: 67975 - DNA, 19 bp, Homo sapiens
  source 1..19: mol_type = genomic DNA
cgtggccgagcggtctaag

SEQ ID NO: 67976 - DNA, 19 bp, Homo sapiens
  source 1..19: mol_type = genomic DNA
cgtggccgagtggtctaag

SEQ ID NO: 67977 - DNA, 16 bp, Homo sapiens
  source 1..16: mol_type = genomic DNA
cgttaacttccaatta

SEQ ID NO: 67978 - DNA, 16 bp, Homo sapiens
  source 1..16: mol_type = genomic DNA
ctaaggcgctgcgttc

SEQ ID NO: 67979 - DNA, 18 bp, Homo sapiens
  source 1..18: mol_type = genomic DNA
ctaatccagaggttccgg

SEQ ID NO: 67980 - DNA, 17 bp, Homo sapiens
  source 1..17: mol_type = genomic DNA
ctaatggataaggcatc

SEQ ID NO: 67981 - DNA, 20 bp, Homo sapiens
  source 1..20: mol_type = genomic DNA
ctaatggataaggcatcagc

SEQ ID NO: 67982 - DNA, 20 bp, Homo sapiens
  source 1..20: mol_type = genomic DNA
ctaattcaaaggttccgggt

SEQ ID NO: 67983 - DNA, 17 bp, Homo sapiens
  source 1..17: mol_type = genomic DNA
ctagtggttaggattcg

SEQ ID NO: 67984 - DNA, 18 bp, Homo sapiens
  source 1..18: mol_type = genomic DNA
ctagtggttaggattcgg

SEQ ID NO: 67985 - DNA, 20 bp, Homo sapiens
  source 1..20: mol_type = genomic DNA
ctagtggttaggattcggcg

SEQ ID NO: 67986 - DNA, 16 bp, Homo sapiens
  source 1..16: mol_type = genomic DNA
ctcagtggtagagcat

SEQ ID NO: 67987 - DNA, 24 bp, Homo sapiens
  source 1..24: mol_type = genomic DNA
ctcagtggtagagcatttgactgc

SEQ ID NO: 67988 - DNA, 20 bp, Homo sapiens
  source 1..20: mol_type = genomic DNA
ctcagtggtagagcgcatgc

SEQ ID NO: 67989 - DNA, 16 bp, Homo sapiens
  source 1..16: mol_type = genomic DNA
ctcagtggtagagcgt

SEQ ID NO: 67990 - DNA, 20 bp, Homo sapiens
  source 1..20: mol_type = genomic DNA
ctcatgcccccatgtctaac

SEQ ID NO: 67991 - DNA, 17 bp, Homo sapiens
  source 1..17: mol_type = genomic DNA
ctccagatcagaaggct

SEQ ID NO: 67992 - DNA, 18 bp, Homo sapiens
  source 1..18: mol_type = genomic DNA
ctcccggtatgggaacca

SEQ ID NO: 67993 - DNA, 16 bp, Homo sapiens
  source 1..16: mol_type = genomic DNA
ctccttagcgcagtag

SEQ ID NO: 67994 - DNA, 17 bp, Homo sapiens
  source 1..17: mol_type = genomic DNA
ctccttagcgcagtagg

SEQ ID NO: 67995 - DNA, 18 bp, Homo sapiens
  source 1..18: mol_type = genomic DNA
ctctgaatccagcgatcc

SEQ ID NO: 67996 - DNA, 16 bp, Homo sapiens
  source 1..16: mol_type = genomic DNA
ctctggactctgaatc

SEQ ID NO: 67997 - DNA, 17 bp, Homo sapiens
  source 1..17: mol_type = genomic DNA
ctctggactctgaatcc

SEQ ID NO: 67998 - DNA, 17 bp, Homo sapiens
  source 1..17: mol_type = genomic DNA
ctctgtggcgcaatcgg

SEQ ID NO: 67999 - DNA, 20 bp, Homo sapiens
  source 1..20: mol_type = genomic DNA
ctcttaatcccagggtcgtg

SEQ ID NO: 68000 - DNA, 18 bp, Homo sapiens
  source 1..18: mol_type = genomic DNA
ctgaaaatgtttagacgg

SEQ ID NO: 68001 - DNA, 16 bp, Homo sapiens
  source 1..16: mol_type = genomic DNA
ctgaaggtcctgagtt

SEQ ID NO: 68002 - DNA, 18 bp, Homo sapiens
  source 1..18: mol_type = genomic DNA
ctgaatccagcgatccga

SEQ ID NO: 68003 - DNA, 20 bp, Homo sapiens
  source 1..20: mol_type = genomic DNA
ctgaatccagcgatccgagt

SEQ ID NO: 68004 - DNA, 21 bp, Homo sapiens
  source 1..21: mol_type = genomic DNA
ctgacaacagaggcttacgac

SEQ ID NO: 68005 - DNA, 18 bp, Homo sapiens
  source 1..18: mol_type = genomic DNA
ctgacttcggatcagaag

SEQ ID NO: 68006 - DNA, 18 bp, Homo sapiens
  source 1..18: mol_type = genomic DNA
ctgccacgcgggaggccc

SEQ ID NO: 68007 - DNA, 17 bp, Homo sapiens
  source 1..17: mol_type = genomic DNA
ctgtcacgcgggagacc

SEQ ID NO: 68008 - DNA, 20 bp, Homo sapiens
  source 1..20: mol_type = genomic DNA
cttacctcctcaaagcaata

SEQ ID NO: 68009 - DNA, 21 bp, Homo sapiens
  source 1..21: mol_type = genomic DNA
cttacctcctcaaagcaatac

SEQ ID NO: 68010 - DNA, 16 bp, Homo sapiens
  source 1..16: mol_type = genomic DNA
cttagcattaaccttt

SEQ ID NO: 68011 - DNA, 21 bp, Homo sapiens
  source 1..21: mol_type = genomic DNA
cttagcattaaccttttaagt

SEQ ID NO: 68012 - DNA, 16 bp, Homo sapiens
  source 1..16: mol_type = genomic DNA
cttaggtcgctggttc

SEQ ID NO: 68013 - DNA, 18 bp, Homo sapiens
  source 1..18: mol_type = genomic DNA
cttccaagcagttgaccc

SEQ ID NO: 68014 - DNA, 18 bp, Homo sapiens
  source 1..18: mol_type = genomic DNA
cttcggatcagaagattg

SEQ ID NO: 68015 - DNA, 20 bp, Homo sapiens
  source 1..20: mol_type = genomic DNA
cttcggatcagaagattgag

SEQ ID NO: 68016 - DNA, 21 bp, Homo sapiens
  source 1..21: mol_type = genomic DNA
cttcggatcagaagattgagg

SEQ ID NO: 68017 - DNA, 19 bp, Homo sapiens
  source 1..19: mol_type = genomic DNA
cttcggatcagaagattgc

SEQ ID NO: 68018 - DNA, 18 bp, Homo sapiens
  source 1..18: mol_type = genomic DNA
cttcgggggcgtgggttc

SEQ ID NO: 68019 - DNA, 16 bp, Homo sapiens
  source 1..16: mol_type = genomic DNA
cttgcgacccgggttc

SEQ ID NO: 68020 - DNA, 23 bp, Homo sapiens
  source 1..23: mol_type = genomic DNA
gaaaaagtcatggaggccatggg

SEQ ID NO: 68021 - DNA, 20 bp, Homo sapiens
  source 1..20: mol_type = genomic DNA
gaaaccatcctctgctacca

SEQ ID NO: 68022 - DNA, 19 bp, Homo sapiens
  source 1..19: mol_type = genomic DNA
gaaaccgggcggaaacacc

SEQ ID NO: 68023 - DNA, 17 bp, Homo sapiens
  source 1..17: mol_type = genomic DNA
gaaaggttggtggttcg

SEQ ID NO: 68024 - DNA, 18 bp, Homo sapiens
  source 1..18: mol_type = genomic DNA
gaaccaacacctctttac

SEQ ID NO: 68025 - DNA, 16 bp, Homo sapiens
  source 1..16: mol_type = genomic DNA
gaagatcacgggttcg

SEQ ID NO: 68026 - DNA, 16 bp, Homo sapiens
  source 1..16: mol_type = genomic DNA
gaagatcgcgggttcg

SEQ ID NO: 68027 - DNA, 17 bp, Homo sapiens
  source 1..17: mol_type = genomic DNA
gaagcgtgctgggccca

SEQ ID NO: 68028 - DNA, 16 bp, Homo sapiens
  source 1..16: mol_type = genomic DNA
gaaggtcgtgagttcg

SEQ ID NO: 68029 - DNA, 20 bp, Homo sapiens
  source 1..20: mol_type = genomic DNA
gaatcacgtcggggtcacca

SEQ ID NO: 68030 - DNA, 19 bp, Homo sapiens
  source 1..19: mol_type = genomic DNA
gaatcccaccgctgccacc

SEQ ID NO: 68031 - DNA, 20 bp, Homo sapiens
  source 1..20: mol_type = genomic DNA
gaatcccacttctgacacca

SEQ ID NO: 68032 - DNA, 20 bp, Homo sapiens
  source 1..20: mol_type = genomic DNA
gaatcccagcggtgcctcca

SEQ ID NO: 68033 - DNA, 19 bp, Homo sapiens
  source 1..19: mol_type = genomic DNA
gaatcccatcctcgtcgcc

SEQ ID NO: 68034 - DNA, 18 bp, Homo sapiens
  source 1..18: mol_type = genomic DNA
gaatccgagtcacggcac

SEQ ID NO: 68035 - DNA, 19 bp, Homo sapiens
  source 1..19: mol_type = genomic DNA
gaatcctgccgactacgcc

SEQ ID NO: 68036 - DNA, 20 bp, Homo sapiens
  source 1..20: mol_type = genomic DNA
gaatcctgccgactacgcca

SEQ ID NO: 68037 - DNA, 23 bp, Homo sapiens
  source 1..23: mol_type = genomic DNA
gaatctgacaacagaggcttacg

SEQ ID NO: 68038 - DNA, 25 bp, Homo sapiens
  source 1..25: mol_type = genomic DNA
gaatctgacaacagaggcttacgac

SEQ ID NO: 68039 - DNA, 17 bp, Homo sapiens
  source 1..17: mol_type = genomic DNA
gacgaggtggccgagtg

SEQ ID NO: 68040 - DNA, 20 bp, Homo sapiens
  source 1..20: mol_type = genomic DNA
gacgaggtggccgagtggtt

SEQ ID NO: 68041 - DNA, 22 bp, Homo sapiens
  source 1..22: mol_type = genomic DNA
gacgaggtggccgagtggttaa

SEQ ID NO: 68042 - DNA, 24 bp, Homo sapiens
  source 1..24: mol_type = genomic DNA
gacgaggtggccgagtggttaagg

SEQ ID NO: 68043 - DNA, 18 bp, Homo sapiens
  source 1..18: mol_type = genomic DNA
gactcccggtatgggaac

SEQ ID NO: 68044 - DNA, 20 bp, Homo sapiens
  source 1..20: mol_type = genomic DNA
gactcccggtatgggaacca

SEQ ID NO: 68045 - DNA, 19 bp, Homo sapiens
  source 1..19: mol_type = genomic DNA
gactcctggctggctcgcc

SEQ ID NO: 68046 - DNA, 17 bp, Homo sapiens
  source 1..17: mol_type = genomic DNA
gacttcggatcagaaga

SEQ ID NO: 68047 - DNA, 23 bp, Homo sapiens
  source 1..23: mol_type = genomic DNA
gagaccggggttcaattccccga

SEQ ID NO: 68048 - DNA, 16 bp, Homo sapiens
  source 1..16: mol_type = genomic DNA
gagaggtagcgggatc

SEQ ID NO: 68049 - DNA, 17 bp, Homo sapiens
  source 1..17: mol_type = genomic DNA
gagaggtagcgggatcg

SEQ ID NO: 68050 - DNA, 19 bp, Homo sapiens
  source 1..19: mol_type = genomic DNA
gagcccacccagggacgcc

SEQ ID NO: 68051 - DNA, 16 bp, Homo sapiens
  source 1..16: mol_type = genomic DNA
gagggttcgagtccct

SEQ ID NO: 68052 - DNA, 20 bp, Homo sapiens
  source 1..20: mol_type = genomic DNA
gagtcccggcagagatgcca

SEQ ID NO: 68053 - DNA, 20 bp, Homo sapiens
  source 1..20: mol_type = genomic DNA
gagtcccggcggagtcgcca

SEQ ID NO: 68054 - DNA, 19 bp, Homo sapiens
  source 1..19: mol_type = genomic DNA
gagtctcggtggaacctcc

SEQ ID NO: 68055 - DNA, 23 bp, Homo sapiens
  source 1..23: mol_type = genomic DNA
gagttcgaacctcagagggggca

SEQ ID NO: 68056 - DNA, 17 bp, Homo sapiens
  source 1..17: mol_type = genomic DNA
gataacagctatccatt

SEQ ID NO: 68057 - DNA, 19 bp, Homo sapiens
  source 1..19: mol_type = genomic DNA
gatccccggcatctccacc

SEQ ID NO: 68058 - DNA, 20 bp, Homo sapiens
  source 1..20: mol_type = genomic DNA
gatcccgggcggaaacacca

SEQ ID NO: 68059 - DNA, 20 bp, Homo sapiens
  source 1..20: mol_type = genomic DNA
gatcccgggtttcggcacca

SEQ ID NO: 68060 - DNA, 19 bp, Homo sapiens
  source 1..19: mol_type = genomic DNA
gatgtagctcagtggtaga

SEQ ID NO: 68061 - DNA, 22 bp, Homo sapiens
  source 1..22: mol_type = genomic DNA
gattccaggttcgactcctggc

SEQ ID NO: 68062 - DNA, 19 bp, Homo sapiens
  source 1..19: mol_type = genomic DNA
gattccccgacggggagcc

SEQ ID NO: 68063 - DNA, 20 bp, Homo sapiens
  source 1..20: mol_type = genomic DNA
gattccccgacggggagcca

SEQ ID NO: 68064 - DNA, 19 bp, Homo sapiens
  source 1..19: mol_type = genomic DNA
gattcccggccaatgcacc

SEQ ID NO: 68065 - DNA, 20 bp, Homo sapiens
  source 1..20: mol_type = genomic DNA
gattcccggccaatgcacca

SEQ ID NO: 68066 - DNA, 19 bp, Homo sapiens
  source 1..19: mol_type = genomic DNA
gattcccggtcagggaacc

SEQ ID NO: 68067 - DNA, 16 bp, Homo sapiens
  source 1..16: mol_type = genomic DNA
gattccggatcagaag

SEQ ID NO: 68068 - DNA, 20 bp, Homo sapiens
  source 1..20: mol_type = genomic DNA
gattccggatcagaagattg

SEQ ID NO: 68069 - DNA, 20 bp, Homo sapiens
  source 1..20: mol_type = genomic DNA
gattcggcgctctcaccgcc

SEQ ID NO: 68070 - DNA, 22 bp, Homo sapiens
  source 1..22: mol_type = genomic DNA
gattctaggttcgactcctggc

SEQ ID NO: 68071 - DNA, 19 bp, Homo sapiens
  source 1..19: mol_type = genomic DNA
gattgagggttcgaatccc

SEQ ID NO: 68072 - DNA, 20 bp, Homo sapiens
  source 1..20: mol_type = genomic DNA
gattgagggttcgaatccct

SEQ ID NO: 68073 - DNA, 22 bp, Homo sapiens
  source 1..22: mol_type = genomic DNA
gattgagggttcgaatcccttc

SEQ ID NO: 68074 - DNA, 17 bp, Homo sapiens
  source 1..17: mol_type = genomic DNA
gattgagggttcgagtc

SEQ ID NO: 68075 - DNA, 18 bp, Homo sapiens
  source 1..18: mol_type = genomic DNA
gattgagggttcgagtcc

SEQ ID NO: 68076 - DNA, 22 bp, Homo sapiens
  source 1..22: mol_type = genomic DNA
gattgcaggttcgagtcctgcc

SEQ ID NO: 68077 - DNA, 24 bp, Homo sapiens
  source 1..24: mol_type = genomic DNA
gattgtgaatctgacaacagaggc

SEQ ID NO: 68078 - DNA, 19 bp, Homo sapiens
  source 1..19: mol_type = genomic DNA
gattgtgggttcgagtccc

SEQ ID NO: 68079 - DNA, 20 bp, Homo sapiens
  source 1..20: mol_type = genomic DNA
gattgtgggttcgagtccca

SEQ ID NO: 68080 - DNA, 22 bp, Homo sapiens
  source 1..22: mol_type = genomic DNA
gattgtgggttcgagtcccatc

SEQ ID NO: 68081 - DNA, 19 bp, Homo sapiens
  source 1..19: mol_type = genomic DNA
gatttcaacttaacttgac

SEQ ID NO: 68082 - DNA, 20 bp, Homo sapiens
  source 1..20: mol_type = genomic DNA
gcatgagactcttaatctca

SEQ ID NO: 68083 - DNA, 19 bp, Homo sapiens
  source 1..19: mol_type = genomic DNA
gcatgggtggttcagtggt

SEQ ID NO: 68084 - DNA, 20 bp, Homo sapiens
  source 1..20: mol_type = genomic DNA
gcatgggtggttcagtggta

SEQ ID NO: 68085 - DNA, 22 bp, Homo sapiens
  source 1..22: mol_type = genomic DNA
gcatgggtggttcagtggtaga

SEQ ID NO: 68086 - DNA, 17 bp, Homo sapiens
  source 1..17: mol_type = genomic DNA
gccaaggtcgcgggttc

SEQ ID NO: 68087 - DNA, 19 bp, Homo sapiens
  source 1..19: mol_type = genomic DNA
gccagggattgtgggttcg

SEQ ID NO: 68088 - DNA, 16 bp, Homo sapiens
  source 1..16: mol_type = genomic DNA
gcccacccagggacgc

SEQ ID NO: 68089 - DNA, 17 bp, Homo sapiens
  source 1..17: mol_type = genomic DNA
gccccagtggaaccacc

SEQ ID NO: 68090 - DNA, 16 bp, Homo sapiens
  source 1..16: mol_type = genomic DNA
gcccccatgtctaaca

SEQ ID NO: 68091 - DNA, 24 bp, Homo sapiens
  source 1..24: mol_type = genomic DNA
gcccggatagctcagtcggtagag

SEQ ID NO: 68092 - DNA, 21 bp, Homo sapiens
  source 1..21: mol_type = genomic DNA
gcccggctagctcagtcggta

SEQ ID NO: 68093 - DNA, 16 bp, Homo sapiens
  source 1..16: mol_type = genomic DNA
gccctcagtaagttgc

SEQ ID NO: 68094 - DNA, 18 bp, Homo sapiens
  source 1..18: mol_type = genomic DNA
gccgaggttgtgagttcg

SEQ ID NO: 68095 - DNA, 18 bp, Homo sapiens
  source 1..18: mol_type = genomic DNA
gcctcacctggagcacca

SEQ ID NO: 68096 - DNA, 17 bp, Homo sapiens
  source 1..17: mol_type = genomic DNA
gcctctttttaccacca

SEQ ID NO: 68097 - DNA, 18 bp, Homo sapiens
  source 1..18: mol_type = genomic DNA
gcctgtcacgcgggagac

SEQ ID NO: 68098 - DNA, 23 bp, Homo sapiens
  source 1..23: mol_type = genomic DNA
gcgatccgagttcaaatctcggt

SEQ ID NO: 68099 - DNA, 23 bp, Homo sapiens
  source 1..23: mol_type = genomic DNA
gcgtgctgggcccataacccaga

SEQ ID NO: 68100 - DNA, 20 bp, Homo sapiens
  source 1..20: mol_type = genomic DNA
gcgtggccgagtggtctaag

SEQ ID NO: 68101 - DNA, 20 bp, Homo sapiens
  source 1..20: mol_type = genomic DNA
gcgttggtggtatagtggta

SEQ ID NO: 68102 - DNA, 19 bp, Homo sapiens
  source 1..19: mol_type = genomic DNA
gctaaataagctatcgggc

SEQ ID NO: 68103 - DNA, 16 bp, Homo sapiens
  source 1..16: mol_type = genomic DNA
gctagctcagtcggta

SEQ ID NO: 68104 - DNA, 20 bp, Homo sapiens
  source 1..20: mol_type = genomic DNA
gctgagtgaagcattggact

SEQ ID NO: 68105 - DNA, 16 bp, Homo sapiens
  source 1..16: mol_type = genomic DNA
gctgtgatggccgagt

SEQ ID NO: 68106 - DNA, 18 bp, Homo sapiens
  source 1..18: mol_type = genomic DNA
gcttctgtagtgtagtgg

SEQ ID NO: 68107 - DNA, 18 bp, Homo sapiens
  source 1..18: mol_type = genomic DNA
ggaagcgtgctgggccca

SEQ ID NO: 68108 - DNA, 16 bp, Homo sapiens
  source 1..16: mol_type = genomic DNA
ggactctgaatccagc

SEQ ID NO: 68109 - DNA, 18 bp, Homo sapiens
  source 1..18: mol_type = genomic DNA
ggactctgaatccagcga

SEQ ID NO: 68110 - DNA, 17 bp, Homo sapiens
  source 1..17: mol_type = genomic DNA
ggagctggggattgtgg

SEQ ID NO: 68111 - DNA, 17 bp, Homo sapiens
  source 1..17: mol_type = genomic DNA
ggatagctcagtcggta

SEQ ID NO: 68112 - DNA, 18 bp, Homo sapiens
  source 1..18: mol_type = genomic DNA
ggatcagaagattccagg

SEQ ID NO: 68113 - DNA, 17 bp, Homo sapiens
  source 1..17: mol_type = genomic DNA
ggatcagaagattgagg

SEQ ID NO: 68114 - DNA, 20 bp, Homo sapiens
  source 1..20: mol_type = genomic DNA
ggattgtgggttcgagtccc

SEQ ID NO: 68115 - DNA, 22 bp, Homo sapiens
  source 1..22: mol_type = genomic DNA
ggccgcagcaacctcggttcga

SEQ ID NO: 68116 - DNA, 18 bp, Homo sapiens
  source 1..18: mol_type = genomic DNA
ggccgcgtggcctaatgg

SEQ ID NO: 68117 - DNA, 20 bp, Homo sapiens
  source 1..20: mol_type = genomic DNA
ggctagctcagtcggtagag

SEQ ID NO: 68118 - DNA, 21 bp, Homo sapiens
  source 1..21: mol_type = genomic DNA
ggctagctcagtcggtagagc

SEQ ID NO: 68119 - DNA, 25 bp, Homo sapiens
  source 1..25: mol_type = genomic DNA
ggctagctcagtcggtagagcatgg

SEQ ID NO: 68120 - DNA, 21 bp, Homo sapiens
  source 1..21: mol_type = genomic DNA
ggctccagtctcttcgggggc

SEQ ID NO: 68121 - DNA, 16 bp, Homo sapiens
  source 1..16: mol_type = genomic DNA
ggctccatagctcagg

SEQ ID NO: 68122 - DNA, 19 bp, Homo sapiens
  source 1..19: mol_type = genomic DNA
gggattgtgggttcgagtc

SEQ ID NO: 68123 - DNA, 24 bp, Homo sapiens
  source 1..24: mol_type = genomic DNA
gggattgtgggttcgagtcccatc

SEQ ID NO: 68124 - DNA, 21 bp, Homo sapiens
  source 1..21: mol_type = genomic DNA
ggggattgtgggttcgagtcc

SEQ ID NO: 68125 - DNA, 25 bp, Homo sapiens
  source 1..25: mol_type = genomic DNA
ggggattgtgggttcgagtcccatc

SEQ ID NO: 68126 - DNA, 17 bp, Homo sapiens
  source 1..17: mol_type = genomic DNA
gggggattagctcaaat

SEQ ID NO: 68127 - DNA, 23 bp, Homo sapiens
  source 1..23: mol_type = genomic DNA
gggggattagctcaaatggtaga

SEQ ID NO: 68128 - DNA, 17 bp, Homo sapiens
  source 1..17: mol_type = genomic DNA
gggggtatagctcagtg

SEQ ID NO: 68129 - DNA, 21 bp, Homo sapiens
  source 1..21: mol_type = genomic DNA
ggggttttgcagtccttacca

SEQ ID NO: 68130 - DNA, 20 bp, Homo sapiens
  source 1..20: mol_type = genomic DNA
gggtcgtgggttcgagcccc

SEQ ID NO: 68131 - DNA, 24 bp, Homo sapiens
  source 1..24: mol_type = genomic DNA
gggtcgtgggttcgagccccacgt

SEQ ID NO: 68132 - DNA, 17 bp, Homo sapiens
  source 1..17: mol_type = genomic DNA
gggtgtgataggtggca

SEQ ID NO: 68133 - DNA, 20 bp, Homo sapiens
  source 1..20: mol_type = genomic DNA
gggttcgattcccgggcggc

SEQ ID NO: 68134 - DNA, 19 bp, Homo sapiens
  source 1..19: mol_type = genomic DNA
gggtttccccgcgcaggtt

SEQ ID NO: 68135 - DNA, 16 bp, Homo sapiens
  source 1..16: mol_type = genomic DNA
ggtagaattctcgcct

SEQ ID NO: 68136 - DNA, 16 bp, Homo sapiens
  source 1..16: mol_type = genomic DNA
ggtagagcatgggact

SEQ ID NO: 68137 - DNA, 18 bp, Homo sapiens
  source 1..18: mol_type = genomic DNA
ggtagagcatttgactgc

SEQ ID NO: 68138 - DNA, 23 bp, Homo sapiens
  source 1..23: mol_type = genomic DNA
ggtagcgtggccgagcggtctaa

SEQ ID NO: 68139 - DNA, 24 bp, Homo sapiens
  source 1..24: mol_type = genomic DNA
ggtagcgtggccgagcggtctaag

SEQ ID NO: 68140 - DNA, 17 bp, Homo sapiens
  source 1..17: mol_type = genomic DNA
ggtagcgtggccgagtg

SEQ ID NO: 68141 - DNA, 22 bp, Homo sapiens
  source 1..22: mol_type = genomic DNA
ggtagcgtggccgagtggtcta

SEQ ID NO: 68142 - DNA, 24 bp, Homo sapiens
  source 1..24: mol_type = genomic DNA
ggtagcgtggccgagtggtctaag

SEQ ID NO: 68143 - DNA, 16 bp, Homo sapiens
  source 1..16: mol_type = genomic DNA
ggtatgattctcgctt

SEQ ID NO: 68144 - DNA, 16 bp, Homo sapiens
  source 1..16: mol_type = genomic DNA
ggtcgatggatcgaaa

SEQ ID NO: 68145 - DNA, 17 bp, Homo sapiens
  source 1..17: mol_type = genomic DNA
ggtcgatggatcgaaac

SEQ ID NO: 68146 - DNA, 19 bp, Homo sapiens
  source 1..19: mol_type = genomic DNA
ggtcgcgggttcgatcccc

SEQ ID NO: 68147 - DNA, 22 bp, Homo sapiens
  source 1..22: mol_type = genomic DNA
ggtcgcgggttcgatccccgta

SEQ ID NO: 68148 - DNA, 17 bp, Homo sapiens
  source 1..17: mol_type = genomic DNA
ggtgagcactctggact

SEQ ID NO: 68149 - DNA, 18 bp, Homo sapiens
  source 1..18: mol_type = genomic DNA
ggtgattttcatattgaa

SEQ ID NO: 68150 - DNA, 19 bp, Homo sapiens
  source 1..19: mol_type = genomic DNA
ggtgattttcatattgaat

SEQ ID NO: 68151 - DNA, 17 bp, Homo sapiens
  source 1..17: mol_type = genomic DNA
ggtgcgagaggtcccgg

SEQ ID NO: 68152 - DNA, 25 bp, Homo sapiens
  source 1..25: mol_type = genomic DNA
ggtggtctagtggttaggattcggc

SEQ ID NO: 68153 - DNA, 20 bp, Homo sapiens
  source 1..20: mol_type = genomic DNA
ggtggttcagtggtagaatt

SEQ ID NO: 68154 - DNA, 18 bp, Homo sapiens
  source 1..18: mol_type = genomic DNA
ggttcaaatcccggacga

SEQ ID NO: 68155 - DNA, 19 bp, Homo sapiens
  source 1..19: mol_type = genomic DNA
ggttcagtggtagaattct

SEQ ID NO: 68156 - DNA, 16 bp, Homo sapiens
  source 1..16: mol_type = genomic DNA
ggttccatagtgtagc

SEQ ID NO: 68157 - DNA, 17 bp, Homo sapiens
  source 1..17: mol_type = genomic DNA
ggttccatggtgtaatg

SEQ ID NO: 68158 - DNA, 16 bp, Homo sapiens
  source 1..16: mol_type = genomic DNA
ggttcgattcccgggc

SEQ ID NO: 68159 - DNA, 19 bp, Homo sapiens
  source 1..19: mol_type = genomic DNA
ggttcgattcccggtcagg

SEQ ID NO: 68160 - DNA, 17 bp, Homo sapiens
  source 1..17: mol_type = genomic DNA
ggttgtagtccgtgcga

SEQ ID NO: 68161 - DNA, 23 bp, Homo sapiens
  source 1..23: mol_type = genomic DNA
ggttgtagtccgtgcgagaatac

SEQ ID NO: 68162 - DNA, 17 bp, Homo sapiens
  source 1..17: mol_type = genomic DNA
ggtttccccgcgcaggt

SEQ ID NO: 68163 - DNA, 18 bp, Homo sapiens
  source 1..18: mol_type = genomic DNA
ggttttgcagtccttacc

SEQ ID NO: 68164 - DNA, 17 bp, Homo sapiens
  source 1..17: mol_type = genomic DNA
gtaaaccggagatgaaa

SEQ ID NO: 68165 - DNA, 17 bp, Homo sapiens
  source 1..17: mol_type = genomic DNA
gtagagcatgagactct

SEQ ID NO: 68166 - DNA, 16 bp, Homo sapiens
  source 1..16: mol_type = genomic DNA
gtagagcatgggactc

SEQ ID NO: 68167 - DNA, 17 bp, Homo sapiens
  source 1..17: mol_type = genomic DNA
gtagtgtagcggttatc

SEQ ID NO: 68168 - DNA, 19 bp, Homo sapiens
  source 1..19: mol_type = genomic DNA
gtagtgtagcggttatcac

SEQ ID NO: 68169 - DNA, 17 bp, Homo sapiens
  source 1..17: mol_type = genomic DNA
gtatgattctcgctttg

SEQ ID NO: 68170 - DNA, 18 bp, Homo sapiens
  source 1..18: mol_type = genomic DNA
gtatgattctcgctttgg

SEQ ID NO: 68171 - DNA, 16 bp, Homo sapiens
  source 1..16: mol_type = genomic DNA
gtcacggtggccgagt

SEQ ID NO: 68172 - DNA, 19 bp, Homo sapiens
  source 1..19: mol_type = genomic DNA
gtcacggtggccgagtggt

SEQ ID NO: 68173 - DNA, 17 bp, Homo sapiens
  source 1..17: mol_type = genomic DNA
gtcaggatggccgagcg

SEQ ID NO: 68174 - DNA, 24 bp, Homo sapiens
  source 1..24: mol_type = genomic DNA
gtcaggatggccgagcggtctaag

SEQ ID NO: 68175 - DNA, 17 bp, Homo sapiens
  source 1..17: mol_type = genomic DNA
gtcaggatggccgagtg

SEQ ID NO: 68176 - DNA, 18 bp, Homo sapiens
  source 1..18: mol_type = genomic DNA
gtcccacccggggtacca

SEQ ID NO: 68177 - DNA, 18 bp, Homo sapiens
  source 1..18: mol_type = genomic DNA
gtcccacctggggtacca

SEQ ID NO: 68178 - DNA, 17 bp, Homo sapiens
  source 1..17: mol_type = genomic DNA
gtcccggcagagatgcc

SEQ ID NO: 68179 - DNA, 17 bp, Homo sapiens
  source 1..17: mol_type = genomic DNA
gtcccggcggagtcgcc

SEQ ID NO: 68180 - DNA, 22 bp, Homo sapiens
  source 1..22: mol_type = genomic DNA
gtcccgggttcaaatcccggac

SEQ ID NO: 68181 - DNA, 18 bp, Homo sapiens
  source 1..18: mol_type = genomic DNA
gtccctgtccaggcgcca

SEQ ID NO: 68182 - DNA, 18 bp, Homo sapiens
  source 1..18: mol_type = genomic DNA
gtcccttcgtggtcgcca

SEQ ID NO: 68183 - DNA, 17 bp, Homo sapiens
  source 1..17: mol_type = genomic DNA
gtcctgggttcgagccc

SEQ ID NO: 68184 - DNA, 16 bp, Homo sapiens
  source 1..16: mol_type = genomic DNA
gtccttgtagtataaa

SEQ ID NO: 68185 - DNA, 16 bp, Homo sapiens
  source 1..16: mol_type = genomic DNA
gtcgatggatcgaaac

SEQ ID NO: 68186 - DNA, 20 bp, Homo sapiens
  source 1..20: mol_type = genomic DNA
gtcgcgagttcaaatctcgc

SEQ ID NO: 68187 - DNA, 17 bp, Homo sapiens
  source 1..17: mol_type = genomic DNA
gtcgcgggttcgatccc

SEQ ID NO: 68188 - DNA, 18 bp, Homo sapiens
  source 1..18: mol_type = genomic DNA
gtcgcgggttcgatcccc

SEQ ID NO: 68189 - DNA, 21 bp, Homo sapiens
  source 1..21: mol_type = genomic DNA
gtcgcgggttcgatccccgta

SEQ ID NO: 68190 - DNA, 19 bp, Homo sapiens
  source 1..19: mol_type = genomic DNA
gtcgctggttcgattccgg

SEQ ID NO: 68191 - DNA, 20 bp, Homo sapiens
  source 1..20: mol_type = genomic DNA
gtcgctggttcgattccggc

SEQ ID NO: 68192 - DNA, 19 bp, Homo sapiens
  source 1..19: mol_type = genomic DNA
gtcggtagagcatcagact

SEQ ID NO: 68193 - DNA, 17 bp, Homo sapiens
  source 1..17: mol_type = genomic DNA
gtcgtgagttcgatcct

SEQ ID NO: 68194 - DNA, 18 bp, Homo sapiens
  source 1..18: mol_type = genomic DNA
gtcgtgagttcgatcctc

SEQ ID NO: 68195 - DNA, 21 bp, Homo sapiens
  source 1..21: mol_type = genomic DNA
gtcgtgggttcgagccccacg

SEQ ID NO: 68196 - DNA, 19 bp, Homo sapiens
  source 1..19: mol_type = genomic DNA
gtctagtggttaggattcg

SEQ ID NO: 68197 - DNA, 24 bp, Homo sapiens
  source 1..24: mol_type = genomic DNA
gtctctgtggcgcaatggacgagc

SEQ ID NO: 68198 - DNA, 17 bp, Homo sapiens
  source 1..17: mol_type = genomic DNA
gtgaatctgacaacaga

SEQ ID NO: 68199 - DNA, 17 bp, Homo sapiens
  source 1..17: mol_type = genomic DNA
gtgattttcatattgaa

SEQ ID NO: 68200 - DNA, 18 bp, Homo sapiens
  source 1..18: mol_type = genomic DNA
gtgattttcatattgaat

SEQ ID NO: 68201 - DNA, 16 bp, Homo sapiens
  source 1..16: mol_type = genomic DNA
gtggccgagcggtcta

SEQ ID NO: 68202 - DNA, 18 bp, Homo sapiens
  source 1..18: mol_type = genomic DNA
gtggccgagcggtctaag

SEQ ID NO: 68203 - DNA, 18 bp, Homo sapiens
  source 1..18: mol_type = genomic DNA
gtggcgcaatggacgagc

SEQ ID NO: 68204 - DNA, 17 bp, Homo sapiens
  source 1..17: mol_type = genomic DNA
gtggctgatttgcgttc

SEQ ID NO: 68205 - DNA, 19 bp, Homo sapiens
  source 1..19: mol_type = genomic DNA
gtggctgatttgcgttcag

SEQ ID NO: 68206 - DNA, 16 bp, Homo sapiens
  source 1..16: mol_type = genomic DNA
gtggggttttgcagtc

SEQ ID NO: 68207 - DNA, 17 bp, Homo sapiens
  source 1..17: mol_type = genomic DNA
gtggggttttgcagtcc

SEQ ID NO: 68208 - DNA, 18 bp, Homo sapiens
  source 1..18: mol_type = genomic DNA
gtgggttcgagtcccatc

SEQ ID NO: 68209 - DNA, 16 bp, Homo sapiens
  source 1..16: mol_type = genomic DNA
gtggtagagcatttga

SEQ ID NO: 68210 - DNA, 18 bp, Homo sapiens
  source 1..18: mol_type = genomic DNA
gtggtagagcatttgact

SEQ ID NO: 68211 - DNA, 19 bp, Homo sapiens
  source 1..19: mol_type = genomic DNA
gtggtagagcatttgactg

SEQ ID NO: 68212 - DNA, 23 bp, Homo sapiens
  source 1..23: mol_type = genomic DNA
gtggttaggattcggcgctctca

SEQ ID NO: 68213 - DNA, 18 bp, Homo sapiens
  source 1..18: mol_type = genomic DNA
gtggttcagtggtagaat

SEQ ID NO: 68214 - DNA, 19 bp, Homo sapiens
  source 1..19: mol_type = genomic DNA
gtggttcagtggtagaatt

SEQ ID NO: 68215 - DNA, 19 bp, Homo sapiens
  source 1..19: mol_type = genomic DNA
gttagcactctggactttg

SEQ ID NO: 68216 - DNA, 16 bp, Homo sapiens
  source 1..16: mol_type = genomic DNA
gttagtactctgcgtt

SEQ ID NO: 68217 - DNA, 16 bp, Homo sapiens
  source 1..16: mol_type = genomic DNA
gttcaaatcccggacg

SEQ ID NO: 68218 - DNA, 23 bp, Homo sapiens
  source 1..23: mol_type = genomic DNA
gttcaaatcccggacgagccccc

SEQ ID NO: 68219 - DNA, 18 bp, Homo sapiens
  source 1..18: mol_type = genomic DNA
gttcagtggtagaattct

SEQ ID NO: 68220 - DNA, 19 bp, Homo sapiens
  source 1..19: mol_type = genomic DNA
gttcagtggtagaattctc

SEQ ID NO: 68221 - DNA, 17 bp, Homo sapiens
  source 1..17: mol_type = genomic DNA
gttccgggttcgagtcc

SEQ ID NO: 68222 - DNA, 24 bp, Homo sapiens
  source 1..24: mol_type = genomic DNA
gttcgaaaccgggcggaaacacca

SEQ ID NO: 68223 - DNA, 21 bp, Homo sapiens
  source 1..21: mol_type = genomic DNA
gttcgaatccgagtcacggca

SEQ ID NO: 68224 - DNA, 21 bp, Homo sapiens
  source 1..21: mol_type = genomic DNA
gttcgagtcccttcgtggtcg

SEQ ID NO: 68225 - DNA, 23 bp, Homo sapiens
  source 1..23: mol_type = genomic DNA
gttcgatcccgggtttcggcacc

SEQ ID NO: 68226 - DNA, 22 bp, Homo sapiens
  source 1..22: mol_type = genomic DNA
gttcgattccccgacggggagc

SEQ ID NO: 68227 - DNA, 23 bp, Homo sapiens
  source 1..23: mol_type = genomic DNA
gttcgattccccgacggggagcc

SEQ ID NO: 68228 - DNA, 24 bp, Homo sapiens
  source 1..24: mol_type = genomic DNA
gttcgattccccgacggggagcca

SEQ ID NO: 68229 - DNA, 22 bp, Homo sapiens
  source 1..22: mol_type = genomic DNA
gttcgattcccggtcagggaac

SEQ ID NO: 68230 - DNA, 23 bp, Homo sapiens
  source 1..23: mol_type = genomic DNA
gttcgattcccggtcagggaacc

SEQ ID NO: 68231 - DNA, 24 bp, Homo sapiens
  source 1..24: mol_type = genomic DNA
gttcgattcccggtcagggaacca

SEQ ID NO: 68232 - DNA, 23 bp, Homo sapiens
  source 1..23: mol_type = genomic DNA
gttcttgtagttgaaatacaacg

SEQ ID NO: 68233 - DNA, 16 bp, Homo sapiens
  source 1..16: mol_type = genomic DNA
gttgtagtccgtgcga

SEQ ID NO: 68234 - DNA, 17 bp, Homo sapiens
  source 1..17: mol_type = genomic DNA
gttgtagtccgtgcgag

SEQ ID NO: 68235 - DNA, 23 bp, Homo sapiens
  source 1..23: mol_type = genomic DNA
gtttatgtagcttacctcctcaa

SEQ ID NO: 68236 - DNA, 21 bp, Homo sapiens
  source 1..21: mol_type = genomic DNA
gtttccgtagtgtagtggtca

SEQ ID NO: 68237 - DNA, 25 bp, Homo sapiens
  source 1..25: mol_type = genomic DNA
gtttccgtagtgtagtggttatcac

SEQ ID NO: 68238 - DNA, 17 bp, Homo sapiens
  source 1..17: mol_type = genomic DNA
gttttgcagtccttacc

SEQ ID NO: 68239 - DNA, 20 bp, Homo sapiens
  source 1..20: mol_type = genomic DNA
taaagtggctgatttgcgtt

SEQ ID NO: 68240 - DNA, 21 bp, Homo sapiens
  source 1..21: mol_type = genomic DNA
taaagtggctgatttgcgttc

SEQ ID NO: 68241 - DNA, 20 bp, Homo sapiens
  source 1..20: mol_type = genomic DNA
taaatcctatatatcttacc

SEQ ID NO: 68242 - DNA, 23 bp, Homo sapiens
  source 1..23: mol_type = genomic DNA
taaattataggctaaatcctata

SEQ ID NO: 68243 - DNA, 21 bp, Homo sapiens
  source 1..21: mol_type = genomic DNA
taaccaaaacatcagattgtg

SEQ ID NO: 68244 - DNA, 22 bp, Homo sapiens
  source 1..22: mol_type = genomic DNA
taaccaaaacatcagattgtga

SEQ ID NO: 68245 - DNA, 21 bp, Homo sapiens
  source 1..21: mol_type = genomic DNA
taacccagaggtcgatggatc

SEQ ID NO: 68246 - DNA, 18 bp, Homo sapiens
  source 1..18: mol_type = genomic DNA
taactcatgcccccatgt

SEQ ID NO: 68247 - DNA, 16 bp, Homo sapiens
  source 1..16: mol_type = genomic DNA
taagccagggattgtg

SEQ ID NO: 68248 - DNA, 18 bp, Homo sapiens
  source 1..18: mol_type = genomic DNA
taagccagggattgtggg

SEQ ID NO: 68249 - DNA, 21 bp, Homo sapiens
  source 1..21: mol_type = genomic DNA
taagctatcgggcccataccc

SEQ ID NO: 68250 - DNA, 21 bp, Homo sapiens
  source 1..21: mol_type = genomic DNA
taagtcccattggtctagcca

SEQ ID NO: 68251 - DNA, 17 bp, Homo sapiens
  source 1..17: mol_type = genomic DNA
taatccagaggttccgg

SEQ ID NO: 68252 - DNA, 19 bp, Homo sapiens
  source 1..19: mol_type = genomic DNA
taatctgaaggtcctgagt

SEQ ID NO: 68253 - DNA, 19 bp, Homo sapiens
  source 1..19: mol_type = genomic DNA
taatctgaaggtcgtgagt

SEQ ID NO: 68254 - DNA, 23 bp, Homo sapiens
  source 1..23: mol_type = genomic DNA
taatctgaaggtcgtgagttcga

SEQ ID NO: 68255 - DNA, 22 bp, Homo sapiens
  source 1..22: mol_type = genomic DNA
taatgccgaggttgtgagttcg

SEQ ID NO: 68256 - DNA, 19 bp, Homo sapiens
  source 1..19: mol_type = genomic DNA
taatggataaggcatcagc

SEQ ID NO: 68257 - DNA, 23 bp, Homo sapiens
  source 1..23: mol_type = genomic DNA
taatggataaggcatcagcctcc

SEQ ID NO: 68258 - DNA, 16 bp, Homo sapiens
  source 1..16: mol_type = genomic DNA
taatggataaggcatt

SEQ ID NO: 68259 - DNA, 16 bp, Homo sapiens
  source 1..16: mol_type = genomic DNA
taatggataaggcgtc

SEQ ID NO: 68260 - DNA, 22 bp, Homo sapiens
  source 1..22: mol_type = genomic DNA
taatggtggagttaaagacttt

SEQ ID NO: 68261 - DNA, 18 bp, Homo sapiens
  source 1..18: mol_type = genomic DNA
taatggttagcactctgg

SEQ ID NO: 68262 - DNA, 17 bp, Homo sapiens
  source 1..17: mol_type = genomic DNA
tacaacgatggtttttc

SEQ ID NO: 68263 - DNA, 20 bp, Homo sapiens
  source 1..20: mol_type = genomic DNA
tacaacgatggtttttcata

SEQ ID NO: 68264 - DNA, 21 bp, Homo sapiens
  source 1..21: mol_type = genomic DNA
tacaacgatggtttttcatat

SEQ ID NO: 68265 - DNA, 22 bp, Homo sapiens
  source 1..22: mol_type = genomic DNA
tacaacgatggtttttcatatc

SEQ ID NO: 68266 - DNA, 22 bp, Homo sapiens
  source 1..22: mol_type = genomic DNA
tactctgcgttgtggccgcagc

SEQ ID NO: 68267 - DNA, 16 bp, Homo sapiens
  source 1..16: mol_type = genomic DNA
tagaattctcgcctgc

SEQ ID NO: 68268 - DNA, 16 bp, Homo sapiens
  source 1..16: mol_type = genomic DNA
tagagcatgagactct

SEQ ID NO: 68269 - DNA, 18 bp, Homo sapiens
  source 1..18: mol_type = genomic DNA
tagagcatgagactctta

SEQ ID NO: 68270 - DNA, 23 bp, Homo sapiens
  source 1..23: mol_type = genomic DNA
tagagcatgagactcttaatctc

SEQ ID NO: 68271 - DNA, 16 bp, Homo sapiens
  source 1..16: mol_type = genomic DNA
tagagcatgggactct

SEQ ID NO: 68272 - DNA, 17 bp, Homo sapiens
  source 1..17: mol_type = genomic DNA
tagcactctggactctg

SEQ ID NO: 68273 - DNA, 18 bp, Homo sapiens
  source 1..18: mol_type = genomic DNA
tagcactctggactctga

SEQ ID NO: 68274 - DNA, 19 bp, Homo sapiens
  source 1..19: mol_type = genomic DNA
taggcctctttttaccacc

SEQ ID NO: 68275 - DNA, 17 bp, Homo sapiens
  source 1..17: mol_type = genomic DNA
taggggtatgattctcg

SEQ ID NO: 68276 - DNA, 23 bp, Homo sapiens
  source 1..23: mol_type = genomic DNA
taggtcgctggttcgattccggc

SEQ ID NO: 68277 - DNA, 24 bp, Homo sapiens
  source 1..24: mol_type = genomic DNA
taggtcgctggttcgattccggct

SEQ ID NO: 68278 - DNA, 25 bp, Homo sapiens
  source 1..25: mol_type = genomic DNA
tagtaccgttaacttccaattaact

SEQ ID NO: 68279 - DNA, 17 bp, Homo sapiens
  source 1..17: mol_type = genomic DNA
tagtactctgcgttgtg

SEQ ID NO: 68280 - DNA, 17 bp, Homo sapiens
  source 1..17: mol_type = genomic DNA
tagtcgtggccgagtgg

SEQ ID NO: 68281 - DNA, 18 bp, Homo sapiens
  source 1..18: mol_type = genomic DNA
tagtggctaggattcggc

SEQ ID NO: 68282 - DNA, 19 bp, Homo sapiens
  source 1..19: mol_type = genomic DNA
tagtggtgagcatagctgc

SEQ ID NO: 68283 - DNA, 19 bp, Homo sapiens
  source 1..19: mol_type = genomic DNA
tagtggttaggattcggcg

SEQ ID NO: 68284 - DNA, 16 bp, Homo sapiens
  source 1..16: mol_type = genomic DNA
tagtggttagtactct

SEQ ID NO: 68285 - DNA, 17 bp, Homo sapiens
  source 1..17: mol_type = genomic DNA
tagtggttagtactctg

SEQ ID NO: 68286 - DNA, 21 bp, Homo sapiens
  source 1..21: mol_type = genomic DNA
tagtggttagtactctgcgtt

SEQ ID NO: 68287 - DNA, 19 bp, Homo sapiens
  source 1..19: mol_type = genomic DNA
tagtggttagtatccccgc

SEQ ID NO: 68288 - DNA, 16 bp, Homo sapiens
  source 1..16: mol_type = genomic DNA
tagtgtagtggttatc

SEQ ID NO: 68289 - DNA, 19 bp, Homo sapiens
  source 1..19: mol_type = genomic DNA
tatagctcagtggtagagc

SEQ ID NO: 68290 - DNA, 18 bp, Homo sapiens
  source 1..18: mol_type = genomic DNA
tatagtggttagtactct

SEQ ID NO: 68291 - DNA, 18 bp, Homo sapiens
  source 1..18: mol_type = genomic DNA
tatccattggtcttaggc

SEQ ID NO: 68292 - DNA, 16 bp, Homo sapiens
  source 1..16: mol_type = genomic DNA
tatgtagcttacctcc

SEQ ID NO: 68293 - DNA, 19 bp, Homo sapiens
  source 1..19: mol_type = genomic DNA
tattgaattgcaaattcga

SEQ ID NO: 68294 - DNA, 21 bp, Homo sapiens
  source 1..21: mol_type = genomic DNA
tcaaaaccaggcggaaacacc

SEQ ID NO: 68295 - DNA, 22 bp, Homo sapiens
  source 1..22: mol_type = genomic DNA
tcaaaaccaggcggaaacacca

SEQ ID NO: 68296 - DNA, 19 bp, Homo sapiens
  source 1..19: mol_type = genomic DNA
tcaaagttaaattataggc

SEQ ID NO: 68297 - DNA, 20 bp, Homo sapiens
  source 1..20: mol_type = genomic DNA
tcaaatcccggacgagcccc

SEQ ID NO: 68298 - DNA, 20 bp, Homo sapiens
  source 1..20: mol_type = genomic DNA
tcaaatctcggtggaacctc

SEQ ID NO: 68299 - DNA, 21 bp, Homo sapiens
  source 1..21: mol_type = genomic DNA
tcaaatctcggtgggacctcc

SEQ ID NO: 68300 - DNA, 20 bp, Homo sapiens
  source 1..20: mol_type = genomic DNA
tcaccgccgcggcccgggtt

SEQ ID NO: 68301 - DNA, 18 bp, Homo sapiens
  source 1..18: mol_type = genomic DNA
tcagaaggctgcgtgttc

SEQ ID NO: 68302 - DNA, 18 bp, Homo sapiens
  source 1..18: mol_type = genomic DNA
tcagaaggttgcgtgttc

SEQ ID NO: 68303 - DNA, 17 bp, Homo sapiens
  source 1..17: mol_type = genomic DNA
tcagtcggtagagcatg

SEQ ID NO: 68304 - DNA, 18 bp, Homo sapiens
  source 1..18: mol_type = genomic DNA
tcatattgaattgcaaat

SEQ ID NO: 68305 - DNA, 16 bp, Homo sapiens
  source 1..16: mol_type = genomic DNA
tccaaataaaagtacc

SEQ ID NO: 68306 - DNA, 18 bp, Homo sapiens
  source 1..18: mol_type = genomic DNA
tccagaggttccgggttc

SEQ ID NO: 68307 - DNA, 18 bp, Homo sapiens
  source 1..18: mol_type = genomic DNA
tccagcgatccgagttca

SEQ ID NO: 68308 - DNA, 21 bp, Homo sapiens
  source 1..21: mol_type = genomic DNA
tccattggggtttccccgcgc

SEQ ID NO: 68309 - DNA, 19 bp, Homo sapiens
  source 1..19: mol_type = genomic DNA
tccattggtcttaggcccc

SEQ ID NO: 68310 - DNA, 17 bp, Homo sapiens
  source 1..17: mol_type = genomic DNA
tcccaccagagtcgcca

SEQ ID NO: 68311 - DNA, 17 bp, Homo sapiens
  source 1..17: mol_type = genomic DNA
tcccacccggggtacca

SEQ ID NO: 68312 - DNA, 17 bp, Homo sapiens
  source 1..17: mol_type = genomic DNA
tcccagtagagcctcca

SEQ ID NO: 68313 - DNA, 20 bp, Homo sapiens
  source 1..20: mol_type = genomic DNA
tcccatatggtctagcggtt

SEQ ID NO: 68314 - DNA, 17 bp, Homo sapiens
  source 1..17: mol_type = genomic DNA
tcccatctggggtgcca

SEQ ID NO: 68315 - DNA, 17 bp, Homo sapiens
  source 1..17: mol_type = genomic DNA
tcccatctgggtcgcca

SEQ ID NO: 68316 - DNA, 16 bp, Homo sapiens
  source 1..16: mol_type = genomic DNA
tcccattggtctagcc

SEQ ID NO: 68317 - DNA, 18 bp, Homo sapiens
  source 1..18: mol_type = genomic DNA
tccccagcacctccacca

SEQ ID NO: 68318 - DNA, 17 bp, Homo sapiens
  source 1..17: mol_type = genomic DNA
tccccagcatctccacc

SEQ ID NO: 68319 - DNA, 17 bp, Homo sapiens
  source 1..17: mol_type = genomic DNA
tccccgacggggagcca

SEQ ID NO: 68320 - DNA, 16 bp, Homo sapiens
  source 1..16: mol_type = genomic DNA
tccccggcacctccac

SEQ ID NO: 68321 - DNA, 16 bp, Homo sapiens
  source 1..16: mol_type = genomic DNA
tccccggcatctccac

SEQ ID NO: 68322 - DNA, 17 bp, Homo sapiens
  source 1..17: mol_type = genomic DNA
tcccggcccatgcacca

SEQ ID NO: 68323 - DNA, 16 bp, Homo sapiens
  source 1..16: mol_type = genomic DNA
tcccgggttcaaatcc

SEQ ID NO: 68324 - DNA, 16 bp, Homo sapiens
  source 1..16: mol_type = genomic DNA
tcccggtcagggaacc

SEQ ID NO: 68325 - DNA, 20 bp, Homo sapiens
  source 1..20: mol_type = genomic DNA
tccctggtggtctagtggct

SEQ ID NO: 68326 - DNA, 21 bp, Homo sapiens
  source 1..21: mol_type = genomic DNA
tccctggtggtctagtggtta

SEQ ID NO: 68327 - DNA, 17 bp, Homo sapiens
  source 1..17: mol_type = genomic DNA
tcccttcgtggttgcca

SEQ ID NO: 68328 - DNA, 18 bp, Homo sapiens
  source 1..18: mol_type = genomic DNA
tccggatcagaagattga

SEQ ID NO: 68329 - DNA, 20 bp, Homo sapiens
  source 1..20: mol_type = genomic DNA
tccggatcagaagattgagg

SEQ ID NO: 68330 - DNA, 18 bp, Homo sapiens
  source 1..18: mol_type = genomic DNA
tcctcacacggggcacca

SEQ ID NO: 68331 - DNA, 17 bp, Homo sapiens
  source 1..17: mol_type = genomic DNA
tcctcgctggggcctcc

SEQ ID NO: 68332 - DNA, 18 bp, Homo sapiens
  source 1..18: mol_type = genomic DNA
tcctcgctggggcctcca

SEQ ID NO: 68333 - DNA, 17 bp, Homo sapiens
  source 1..17: mol_type = genomic DNA
tcctgtcggctacgcca

SEQ ID NO: 68334 - DNA, 17 bp, Homo sapiens
  source 1..17: mol_type = genomic DNA
tccttaggtcgctggtt

SEQ ID NO: 68335 - DNA, 18 bp, Homo sapiens
  source 1..18: mol_type = genomic DNA
tccttaggtcgctggttc

SEQ ID NO: 68336 - DNA, 19 bp, Homo sapiens
  source 1..19: mol_type = genomic DNA
tcgaaaccatcctctgcta

SEQ ID NO: 68337 - DNA, 20 bp, Homo sapiens
  source 1..20: mol_type = genomic DNA
tcgaaaccgggcggaaacac

SEQ ID NO: 68338 - DNA, 21 bp, Homo sapiens
  source 1..21: mol_type = genomic DNA
tcgaaccccactcctggtacc

SEQ ID NO: 68339 - DNA, 19 bp, Homo sapiens
  source 1..19: mol_type = genomic DNA
tcgaacctcagagggggca

SEQ ID NO: 68340 - DNA, 16 bp, Homo sapiens
  source 1..16: mol_type = genomic DNA
tcgaagaagcagcttc

SEQ ID NO: 68341 - DNA, 19 bp, Homo sapiens
  source 1..19: mol_type = genomic DNA
tcgaagaagcagcttcaaa

SEQ ID NO: 68342 - DNA, 20 bp, Homo sapiens
  source 1..20: mol_type = genomic DNA
tcgaagaagcagcttcaaac

SEQ ID NO: 68343 - DNA, 17 bp, Homo sapiens
  source 1..17: mol_type = genomic DNA
tcgaatccgagtcacgg

SEQ ID NO: 68344 - DNA, 21 bp, Homo sapiens
  source 1..21: mol_type = genomic DNA
tcgaatccggctcgaaggacc

SEQ ID NO: 68345 - DNA, 21 bp, Homo sapiens
  source 1..21: mol_type = genomic DNA
tcgaatcctgccgactacgcc

SEQ ID NO: 68346 - DNA, 22 bp, Homo sapiens
  source 1..22: mol_type = genomic DNA
tcgagcccacccagggacgcca

SEQ ID NO: 68347 - DNA, 20 bp, Homo sapiens
  source 1..20: mol_type = genomic DNA
tcgagtcccggcagagatgc

SEQ ID NO: 68348 - DNA, 22 bp, Homo sapiens
  source 1..22: mol_type = genomic DNA
tcgagtcccggcagagatgcca

SEQ ID NO: 68349 - DNA, 22 bp, Homo sapiens
  source 1..22: mol_type = genomic DNA
tcgagtcccggcggagtcgcca

SEQ ID NO: 68350 - DNA, 22 bp, Homo sapiens
  source 1..22: mol_type = genomic DNA
tcgatccccggcatctccacca

SEQ ID NO: 68351 - DNA, 19 bp, Homo sapiens
  source 1..19: mol_type = genomic DNA
tcgattccccgacggggag

SEQ ID NO: 68352 - DNA, 22 bp, Homo sapiens
  source 1..22: mol_type = genomic DNA
tcgattcccggccaatgcacca

SEQ ID NO: 68353 - DNA, 19 bp, Homo sapiens
  source 1..19: mol_type = genomic DNA
tcgattcccgggcggcgca

SEQ ID NO: 68354 - DNA, 21 bp, Homo sapiens
  source 1..21: mol_type = genomic DNA
tcgattcccggtcagggaacc

SEQ ID NO: 68355 - DNA, 21 bp, Homo sapiens
  source 1..21: mol_type = genomic DNA
tcgattccttccttttttgcc

SEQ ID NO: 68356 - DNA, 16 bp, Homo sapiens
  source 1..16: mol_type = genomic DNA
tcgggggcgtgggttc

SEQ ID NO: 68357 - DNA, 16 bp, Homo sapiens
  source 1..16: mol_type = genomic DNA
tcggtagagcatcaga

SEQ ID NO: 68358 - DNA, 17 bp, Homo sapiens
  source 1..17: mol_type = genomic DNA
tcggtagagcatcagac

SEQ ID NO: 68359 - DNA, 18 bp, Homo sapiens
  source 1..18: mol_type = genomic DNA
tcggtagagcatcagact

SEQ ID NO: 68360 - DNA, 21 bp, Homo sapiens
  source 1..21: mol_type = genomic DNA
tcggtagagcatcagactttt

SEQ ID NO: 68361 - DNA, 18 bp, Homo sapiens
  source 1..18: mol_type = genomic DNA
tcggtagagcatgagact

SEQ ID NO: 68362 - DNA, 17 bp, Homo sapiens
  source 1..17: mol_type = genomic DNA
tcggtttgggtccgaga

SEQ ID NO: 68363 - DNA, 19 bp, Homo sapiens
  source 1..19: mol_type = genomic DNA
tcgtatagtggttagtact

SEQ ID NO: 68364 - DNA, 16 bp, Homo sapiens
  source 1..16: mol_type = genomic DNA
tctgaaggtcctgagt

SEQ ID NO: 68365 - DNA, 19 bp, Homo sapiens
  source 1..19: mol_type = genomic DNA
tctgaatccagcgatccga

SEQ ID NO: 68366 - DNA, 18 bp, Homo sapiens
  source 1..18: mol_type = genomic DNA
tctgacaacagaggctta

SEQ ID NO: 68367 - DNA, 17 bp, Homo sapiens
  source 1..17: mol_type = genomic DNA
tctggactctgaatcca

SEQ ID NO: 68368 - DNA, 20 bp, Homo sapiens
  source 1..20: mol_type = genomic DNA
tctggactctgaatccagcg

SEQ ID NO: 68369 - DNA, 16 bp, Homo sapiens
  source 1..16: mol_type = genomic DNA
tctggactttgaatcc

SEQ ID NO: 68370 - DNA, 16 bp, Homo sapiens
  source 1..16: mol_type = genomic DNA
tctgtggcgcaatcgg

SEQ ID NO: 68371 - DNA, 17 bp, Homo sapiens
  source 1..17: mol_type = genomic DNA
tcttgcgacccgggttc

SEQ ID NO: 68372 - DNA, 19 bp, Homo sapiens
  source 1..19: mol_type = genomic DNA
tgaaaacctttttccaagg

SEQ ID NO: 68373 - DNA, 16 bp, Homo sapiens
  source 1..16: mol_type = genomic DNA
tgaaggtcgtgagttc

SEQ ID NO: 68374 - DNA, 17 bp, Homo sapiens
  source 1..17: mol_type = genomic DNA
tgaaggtcgtgagttcg

SEQ ID NO: 68375 - DNA, 17 bp, Homo sapiens
  source 1..17: mol_type = genomic DNA
tgaatccagcgatccga

SEQ ID NO: 68376 - DNA, 20 bp, Homo sapiens
  source 1..20: mol_type = genomic DNA
tgaatccagcgatccgagtt

SEQ ID NO: 68377 - DNA, 16 bp, Homo sapiens
  source 1..16: mol_type = genomic DNA
tgaatctgacaacaga

SEQ ID NO: 68378 - DNA, 22 bp, Homo sapiens
  source 1..22: mol_type = genomic DNA
tgaatctgacaacagaggctta

SEQ ID NO: 68379 - DNA, 23 bp, Homo sapiens
  source 1..23: mol_type = genomic DNA
tgaatctgacaacagaggcttac

SEQ ID NO: 68380 - DNA, 19 bp, Homo sapiens
  source 1..19: mol_type = genomic DNA
tgacaacagaggcttacga

SEQ ID NO: 68381 - DNA, 20 bp, Homo sapiens
  source 1..20: mol_type = genomic DNA
tgacaacagaggcttacgac

SEQ ID NO: 68382 - DNA, 17 bp, Homo sapiens
  source 1..17: mol_type = genomic DNA
tgacttcggatcagaag

SEQ ID NO: 68383 - DNA, 20 bp, Homo sapiens
  source 1..20: mol_type = genomic DNA
tgacttcggatcagaagatt

SEQ ID NO: 68384 - DNA, 22 bp, Homo sapiens
  source 1..22: mol_type = genomic DNA
tgacttcggatcagaagattga

SEQ ID NO: 68385 - DNA, 22 bp, Homo sapiens
  source 1..22: mol_type = genomic DNA
tgacttcggatcagaagattgc

SEQ ID NO: 68386 - DNA, 23 bp, Homo sapiens
  source 1..23: mol_type = genomic DNA
tgacttcggatcagaagattgca

SEQ ID NO: 68387 - DNA, 16 bp, Homo sapiens
  source 1..16: mol_type = genomic DNA
tgagggtccagggttc

SEQ ID NO: 68388 - DNA, 17 bp, Homo sapiens
  source 1..17: mol_type = genomic DNA
tgagggttcgagtccct

SEQ ID NO: 68389 - DNA, 17 bp, Homo sapiens
  source 1..17: mol_type = genomic DNA
tgattccggatcagaag

SEQ ID NO: 68390 - DNA, 21 bp, Homo sapiens
  source 1..21: mol_type = genomic DNA
tgattccggatcagaagattg

SEQ ID NO: 68391 - DNA, 19 bp, Homo sapiens
  source 1..19: mol_type = genomic DNA
tgattctcggtttgggtcc

SEQ ID NO: 68392 - DNA, 17 bp, Homo sapiens
  source 1..17: mol_type = genomic DNA
tgcaaattcgaagaagc

SEQ ID NO: 68393 - DNA, 22 bp, Homo sapiens
  source 1..22: mol_type = genomic DNA
tgcacgcgtgggttcgaatccc

SEQ ID NO: 68394 - DNA, 16 bp, Homo sapiens
  source 1..16: mol_type = genomic DNA
tgccacgcgggaggcc

SEQ ID NO: 68395 - DNA, 17 bp, Homo sapiens
  source 1..17: mol_type = genomic DNA
tgccacgcgggaggccc

SEQ ID NO: 68396 - DNA, 18 bp, Homo sapiens
  source 1..18: mol_type = genomic DNA
tgcccgcattctccacca

SEQ ID NO: 68397 - DNA, 19 bp, Homo sapiens
  source 1..19: mol_type = genomic DNA
tgcgagaggtcccgggttc

SEQ ID NO: 68398 - DNA, 19 bp, Homo sapiens
  source 1..19: mol_type = genomic DNA
tggactctgaatccagcga

SEQ ID NO: 68399 - DNA, 18 bp, Homo sapiens
  source 1..18: mol_type = genomic DNA
tggagttaaagacttttt

SEQ ID NO: 68400 - DNA, 18 bp, Homo sapiens
  source 1..18: mol_type = genomic DNA
tggataacgcgtctgact

SEQ ID NO: 68401 - DNA, 18 bp, Homo sapiens
  source 1..18: mol_type = genomic DNA
tggataaggcatcagcct

SEQ ID NO: 68402 - DNA, 19 bp, Homo sapiens
  source 1..19: mol_type = genomic DNA
tggataaggcatcagcctc

SEQ ID NO: 68403 - DNA, 16 bp, Homo sapiens
  source 1..16: mol_type = genomic DNA
tggatagcgcattgga

SEQ ID NO: 68404 - DNA, 17 bp, Homo sapiens
  source 1..17: mol_type = genomic DNA
tggatttaggctccagt

SEQ ID NO: 68405 - DNA, 17 bp, Homo sapiens
  source 1..17: mol_type = genomic DNA
tggcacggagaattttg

SEQ ID NO: 68406 - DNA, 17 bp, Homo sapiens
  source 1..17: mol_type = genomic DNA
tggccgagtggtctaag

SEQ ID NO: 68407 - DNA, 16 bp, Homo sapiens
  source 1..16: mol_type = genomic DNA
tggctaggattcggcg

SEQ ID NO: 68408 - DNA, 17 bp, Homo sapiens
  source 1..17: mol_type = genomic DNA
tggctaggattcggcgc

SEQ ID NO: 68409 - DNA, 23 bp, Homo sapiens
  source 1..23: mol_type = genomic DNA
tggctaggattcggcgctttcac

SEQ ID NO: 68410 - DNA, 16 bp, Homo sapiens
  source 1..16: mol_type = genomic DNA
tggctgatttgcgttc

SEQ ID NO: 68411 - DNA, 17 bp, Homo sapiens
  source 1..17: mol_type = genomic DNA
tgggcccataacccaga

SEQ ID NO: 68412 - DNA, 16 bp, Homo sapiens
  source 1..16: mol_type = genomic DNA
tggggtctccccgcgc

SEQ ID NO: 68413 - DNA, 16 bp, Homo sapiens
  source 1..16: mol_type = genomic DNA
tggggtttccccgcgc

SEQ ID NO: 68414 - DNA, 20 bp, Homo sapiens
  source 1..20: mol_type = genomic DNA
tggggtttccccgcgcaggt

SEQ ID NO: 68415 - DNA, 17 bp, Homo sapiens
  source 1..17: mol_type = genomic DNA
tgggttcgagtcccacc

SEQ ID NO: 68416 - DNA, 17 bp, Homo sapiens
  source 1..17: mol_type = genomic DNA
tgggttcgagtcccatc

SEQ ID NO: 68417 - DNA, 18 bp, Homo sapiens
  source 1..18: mol_type = genomic DNA
tggtagaattctcgcctg

SEQ ID NO: 68418 - DNA, 17 bp, Homo sapiens
  source 1..17: mol_type = genomic DNA
tggtagagcatttgact

SEQ ID NO: 68419 - DNA, 18 bp, Homo sapiens
  source 1..18: mol_type = genomic DNA
tggtagagcatttgactg

SEQ ID NO: 68420 - DNA, 19 bp, Homo sapiens
  source 1..19: mol_type = genomic DNA
tggtagagcatttgactgc

SEQ ID NO: 68421 - DNA, 17 bp, Homo sapiens
  source 1..17: mol_type = genomic DNA
tggtatcatgcaagatt

SEQ ID NO: 68422 - DNA, 19 bp, Homo sapiens
  source 1..19: mol_type = genomic DNA
tggtatcatgcaagattcc

SEQ ID NO: 68423 - DNA, 24 bp, Homo sapiens
  source 1..24: mol_type = genomic DNA
tggtcgtggttgtagtccgtgcga

SEQ ID NO: 68424 - DNA, 19 bp, Homo sapiens
  source 1..19: mol_type = genomic DNA
tggtctagcggttaggatt

SEQ ID NO: 68425 - DNA, 23 bp, Homo sapiens
  source 1..23: mol_type = genomic DNA
tggtctaggggtatgattctcgc

SEQ ID NO: 68426 - DNA, 23 bp, Homo sapiens
  source 1..23: mol_type = genomic DNA
tggtctagtggctaggattcggc

SEQ ID NO: 68427 - DNA, 19 bp, Homo sapiens
  source 1..19: mol_type = genomic DNA
tggtctagtggttaggatt

SEQ ID NO: 68428 - DNA, 24 bp, Homo sapiens
  source 1..24: mol_type = genomic DNA
tggtggtatagtggttagcatagc

SEQ ID NO: 68429 - DNA, 22 bp, Homo sapiens
  source 1..22: mol_type = genomic DNA
tggtggtctagtggttaggatt

SEQ ID NO: 68430 - DNA, 16 bp, Homo sapiens
  source 1..16: mol_type = genomic DNA
tggtgtagtggtatca

SEQ ID NO: 68431 - DNA, 17 bp, Homo sapiens
  source 1..17: mol_type = genomic DNA
tggttagcactctggac

SEQ ID NO: 68432 - DNA, 17 bp, Homo sapiens
  source 1..17: mol_type = genomic DNA
tggttagtactctgcgt

SEQ ID NO: 68433 - DNA, 17 bp, Homo sapiens
  source 1..17: mol_type = genomic DNA
tggttatcacgttcgcc

SEQ ID NO: 68434 - DNA, 20 bp, Homo sapiens
  source 1..20: mol_type = genomic DNA
tggttcaaatccgggtgccc

SEQ ID NO: 68435 - DNA, 16 bp, Homo sapiens
  source 1..16: mol_type = genomic DNA
tggttcgattccggct

SEQ ID NO: 68436 - DNA, 19 bp, Homo sapiens
  source 1..19: mol_type = genomic DNA
tggttcgattccggctcga

SEQ ID NO: 68437 - DNA, 18 bp, Homo sapiens
  source 1..18: mol_type = genomic DNA
tgtaaaccggagatgaaa

SEQ ID NO: 68438 - DNA, 18 bp, Homo sapiens
  source 1..18: mol_type = genomic DNA
tgtagtccgtgcgagaat

SEQ ID NO: 68439 - DNA, 20 bp, Homo sapiens
  source 1..20: mol_type = genomic DNA
tgtgaatctgacaacagagg

SEQ ID NO: 68440 - DNA, 21 bp, Homo sapiens
  source 1..21: mol_type = genomic DNA
tgtgaatctgacaacagaggc

SEQ ID NO: 68441 - DNA, 22 bp, Homo sapiens
  source 1..22: mol_type = genomic DNA
tgtgaatctgacaacagaggct

SEQ ID NO: 68442 - DNA, 24 bp, Homo sapiens
  source 1..24: mol_type = genomic DNA
tgttcgaatcacgtcggggtcacc

SEQ ID NO: 68443 - DNA, 19 bp, Homo sapiens
  source 1..19: mol_type = genomic DNA
ttaaaactttacagtcaga

SEQ ID NO: 68444 - DNA, 19 bp, Homo sapiens
  source 1..19: mol_type = genomic DNA
ttaaacaaaacgaatgatt

SEQ ID NO: 68445 - DNA, 22 bp, Homo sapiens
  source 1..22: mol_type = genomic DNA
ttaaagtggctgatttgcgttc

SEQ ID NO: 68446 - DNA, 21 bp, Homo sapiens
  source 1..21: mol_type = genomic DNA
ttaaattatgataatcatatt

SEQ ID NO: 68447 - DNA, 19 bp, Homo sapiens
  source 1..19: mol_type = genomic DNA
ttaacacaaagcacccaac

SEQ ID NO: 68448 - DNA, 21 bp, Homo sapiens
  source 1..21: mol_type = genomic DNA
ttaaccaaaacatcagattgt

SEQ ID NO: 68449 - DNA, 17 bp, Homo sapiens
  source 1..17: mol_type = genomic DNA
ttaatcccagggtcgtg

SEQ ID NO: 68450 - DNA, 17 bp, Homo sapiens
  source 1..17: mol_type = genomic DNA
ttaatctcagggtcgtg

SEQ ID NO: 68451 - DNA, 19 bp, Homo sapiens
  source 1..19: mol_type = genomic DNA
ttacctcctcaaagcaata

SEQ ID NO: 68452 - DNA, 19 bp, Homo sapiens
  source 1..19: mol_type = genomic DNA
ttacgaccccttatttacc

SEQ ID NO: 68453 - DNA, 16 bp, Homo sapiens
  source 1..16: mol_type = genomic DNA
ttagcactctggactc

SEQ ID NO: 68454 - DNA, 21 bp, Homo sapiens
  source 1..21: mol_type = genomic DNA
ttagcattaaccttttaagtt

SEQ ID NO: 68455 - DNA, 22 bp, Homo sapiens
  source 1..22: mol_type = genomic DNA
ttcaaatcccggacgagccccc

SEQ ID NO: 68456 - DNA, 22 bp, Homo sapiens
  source 1..22: mol_type = genomic DNA
ttcaaatctcggtggaacctcc

SEQ ID NO: 68457 - DNA, 23 bp, Homo sapiens
  source 1..23: mol_type = genomic DNA
ttcaaatctcggtggaacctcca

SEQ ID NO: 68458 - DNA, 17 bp, Homo sapiens
  source 1..17: mol_type = genomic DNA
ttcaagtccctgttcgg

SEQ ID NO: 68459 - DNA, 21 bp, Homo sapiens
  source 1..21: mol_type = genomic DNA
ttcacccaggcggcccgggtt

SEQ ID NO: 68460 - DNA, 17 bp, Homo sapiens
  source 1..17: mol_type = genomic DNA
ttcagtggtagaattct

SEQ ID NO: 68461 - DNA, 20 bp, Homo sapiens
  source 1..20: mol_type = genomic DNA
ttccaggttcgactcctggc

SEQ ID NO: 68462 - DNA, 17 bp, Homo sapiens
  source 1..17: mol_type = genomic DNA
ttccccgacggggagcc

SEQ ID NO: 68463 - DNA, 16 bp, Homo sapiens
  source 1..16: mol_type = genomic DNA
ttcccggccaacgcac

SEQ ID NO: 68464 - DNA, 16 bp, Homo sapiens
  source 1..16: mol_type = genomic DNA
ttcccggccaatgcac

SEQ ID NO: 68465 - DNA, 18 bp, Homo sapiens
  source 1..18: mol_type = genomic DNA
ttcccggccagggaacca

SEQ ID NO: 68466 - DNA, 18 bp, Homo sapiens
  source 1..18: mol_type = genomic DNA
ttccggatcagaagattg

SEQ ID NO: 68467 - DNA, 21 bp, Homo sapiens
  source 1..21: mol_type = genomic DNA
ttccggatcagaagattgagg

SEQ ID NO: 68468 - DNA, 23 bp, Homo sapiens
  source 1..23: mol_type = genomic DNA
ttccggatcagaagattgagggt

SEQ ID NO: 68469 - DNA, 18 bp, Homo sapiens
  source 1..18: mol_type = genomic DNA
ttcctcttcttaacacca

SEQ ID NO: 68470 - DNA, 17 bp, Homo sapiens
  source 1..17: mol_type = genomic DNA
ttccttccttttttgcc

SEQ ID NO: 68471 - DNA, 23 bp, Homo sapiens
  source 1..23: mol_type = genomic DNA
ttcgaaaccgggcggaaacacca

SEQ ID NO: 68472 - DNA, 17 bp, Homo sapiens
  source 1..17: mol_type = genomic DNA
ttcgaatcccagcggtg

SEQ ID NO: 68473 - DNA, 23 bp, Homo sapiens
  source 1..23: mol_type = genomic DNA
ttcgaatccgagtcacggcacca

SEQ ID NO: 68474 - DNA, 16 bp, Homo sapiens
  source 1..16: mol_type = genomic DNA
ttcgactcccggtatg

SEQ ID NO: 68475 - DNA, 17 bp, Homo sapiens
  source 1..17: mol_type = genomic DNA
ttcgactcccggtgtgg

SEQ ID NO: 68476 - DNA, 18 bp, Homo sapiens
  source 1..18: mol_type = genomic DNA
ttcgactcccggtgtggg

SEQ ID NO: 68477 - DNA, 16 bp, Homo sapiens
  source 1..16: mol_type = genomic DNA
ttcgagcccacccagg

SEQ ID NO: 68478 - DNA, 17 bp, Homo sapiens
  source 1..17: mol_type = genomic DNA
ttcgagcccacccaggg

SEQ ID NO: 68479 - DNA, 23 bp, Homo sapiens
  source 1..23: mol_type = genomic DNA
ttcgagcccacccagggacgcca

SEQ ID NO: 68480 - DNA, 17 bp, Homo sapiens
  source 1..17: mol_type = genomic DNA
ttcgagccccacgttgg

SEQ ID NO: 68481 - DNA, 23 bp, Homo sapiens
  source 1..23: mol_type = genomic DNA
ttcgagtcccggcagagatgcca

SEQ ID NO: 68482 - DNA, 23 bp, Homo sapiens
  source 1..23: mol_type = genomic DNA
ttcgatccccggcatctccacca

SEQ ID NO: 68483 - DNA, 23 bp, Homo sapiens
  source 1..23: mol_type = genomic DNA
ttcgattccccgacggggagcca

SEQ ID NO: 68484 - DNA, 20 bp, Homo sapiens
  source 1..20: mol_type = genomic DNA
ttcgattcccgggcggcgca

SEQ ID NO: 68485 - DNA, 16 bp, Homo sapiens
  source 1..16: mol_type = genomic DNA
ttcgattcccggtcag

SEQ ID NO: 68486 - DNA, 22 bp, Homo sapiens
  source 1..22: mol_type = genomic DNA
ttcgattccggctcgaaggacc

SEQ ID NO: 68487 - DNA, 19 bp, Homo sapiens
  source 1..19: mol_type = genomic DNA
ttcgggtgcgagaggtccc

SEQ ID NO: 68488 - DNA, 21 bp, Homo sapiens
  source 1..21: mol_type = genomic DNA
ttcgggtgcgagaggtcccgg

SEQ ID NO: 68489 - DNA, 16 bp, Homo sapiens
  source 1..16: mol_type = genomic DNA
ttctcgcctgccacgc

SEQ ID NO: 68490 - DNA, 16 bp, Homo sapiens
  source 1..16: mol_type = genomic DNA
ttctcgctggggcctc

SEQ ID NO: 68491 - DNA, 18 bp, Homo sapiens
  source 1..18: mol_type = genomic DNA
ttcttgcgacccgggttc

SEQ ID NO: 68492 - DNA, 25 bp, Homo sapiens
  source 1..25: mol_type = genomic DNA
ttgacaacattcaaaaaagagtacc

SEQ ID NO: 68493 - DNA, 23 bp, Homo sapiens
  source 1..23: mol_type = genomic DNA
ttgacccgggttcgattcccggc

SEQ ID NO: 68494 - DNA, 18 bp, Homo sapiens
  source 1..18: mol_type = genomic DNA
ttgagggttcgaatccct

SEQ ID NO: 68495 - DNA, 20 bp, Homo sapiens
  source 1..20: mol_type = genomic DNA
ttgagggttcgagtcccttc

SEQ ID NO: 68496 - DNA, 18 bp, Homo sapiens
  source 1..18: mol_type = genomic DNA
ttgcaaattcgaagaagc

SEQ ID NO: 68497 - DNA, 21 bp, Homo sapiens
  source 1..21: mol_type = genomic DNA
ttgcaaattcgaagaagcagc

SEQ ID NO: 68498 - DNA, 17 bp, Homo sapiens
  source 1..17: mol_type = genomic DNA
ttgcgttcagttgatgc

SEQ ID NO: 68499 - DNA, 18 bp, Homo sapiens
  source 1..18: mol_type = genomic DNA
ttgcgttcagttgatgca

SEQ ID NO: 68500 - DNA, 17 bp, Homo sapiens
  source 1..17: mol_type = genomic DNA
ttgggtgcgagaggtcc

SEQ ID NO: 68501 - DNA, 19 bp, Homo sapiens
  source 1..19: mol_type = genomic DNA
ttgggtgcgagaggtcccg

SEQ ID NO: 68502 - DNA, 17 bp, Homo sapiens
  source 1..17: mol_type = genomic DNA
ttggtggttcagtggta

SEQ ID NO: 68503 - DNA, 17 bp, Homo sapiens
  source 1..17: mol_type = genomic DNA
ttggtggttcgagccca

SEQ ID NO: 68504 - DNA, 17 bp, Homo sapiens
  source 1..17: mol_type = genomic DNA
ttgtggccgcagcaacc

SEQ ID NO: 68505 - DNA, 18 bp, Homo sapiens
  source 1..18: mol_type = genomic DNA
ttgtgggttcgagtccca

SEQ ID NO: 68506 - DNA, 20 bp, Homo sapiens
  source 1..20: mol_type = genomic DNA
ttgtgggttcgagtcccacc

SEQ ID NO: 68507 - DNA, 18 bp, Homo sapiens
  source 1..18: mol_type = genomic DNA
ttgtgggtttaagtccca

SEQ ID NO: 68508 - DNA, 19 bp, Homo sapiens
  source 1..19: mol_type = genomic DNA
tttaaccaaaacatcagat

SEQ ID NO: 68509 - DNA, 18 bp, Homo sapiens
  source 1..18: mol_type = genomic DNA
tttaggctccagtcattt

SEQ ID NO: 68510 - DNA, 25 bp, Homo sapiens
  source 1..25: mol_type = genomic DNA
tttcaacttaacttgaccgctctga

SEQ ID NO: 68511 - DNA, 20 bp, Homo sapiens
  source 1..20: mol_type = genomic DNA
tttcatattgaattgcaaat

SEQ ID NO: 68512 - DNA, 22 bp, Homo sapiens
  source 1..22: mol_type = genomic DNA
tttccgtagtgtagtggtcatc

SEQ ID NO: 68513 - DNA, 21 bp, Homo sapiens
  source 1..21: mol_type = genomic DNA
tttccgtagtgtagtggttat

SEQ ID NO: 68514 - DNA, 23 bp, Homo sapiens
  source 1..23: mol_type = genomic DNA
tttccgtagtgtagtggttatca

SEQ ID NO: 68515 - DNA, 19 bp, Homo sapiens
  source 1..19: mol_type = genomic DNA
tttgcgttcagttgatgca

SEQ ID NO: 68516 - DNA, 20 bp, Homo sapiens
  source 1..20: mol_type = genomic DNA
tttgggtgcgagaggtcccg

SEQ ID NO: 68517 - DNA, 19 bp, Homo sapiens
  source 1..19: mol_type = genomic DNA
tttgtgggtttaagtccca

SEQ ID NO: 68518 - DNA, 16 bp, Homo sapiens
  source 1..16: mol_type = genomic DNA
ttttgcagtccttacc

SEQ ID NO: 68519 - DNA, 16 bp, Homo sapiens
  source 1..16: mol_type = genomic DNA
tttttcatatcattgg

SEQ ID NO: 68520 - DNA, 20 bp, Homo sapiens
  source 1..20: mol_type = genomic DNA
aaacctttttccaaggacac

SEQ ID NO: 68521 - DNA, 20 bp, Homo sapiens
  source 1..20: mol_type = genomic DNA
aaactttacagtcagaggtt

SEQ ID NO: 68522 - DNA, 21 bp, Homo sapiens
  source 1..21: mol_type = genomic DNA
aaagcacccaacttacactta

SEQ ID NO: 68523 - DNA, 25 bp, Homo sapiens
  source 1..25: mol_type = genomic DNA
aaagctcacaagaactgctaactca

SEQ ID NO: 68524 - DNA, 25 bp, Homo sapiens
  source 1..25: mol_type = genomic DNA
aaaggtccccggttcgaaaccgggc

SEQ ID NO: 68525 - DNA, 25 bp, Homo sapiens
  source 1..25: mol_type = genomic DNA
aaaggttccgggttcgagtcccggc

SEQ ID NO: 68526 - DNA, 17 bp, Homo sapiens
  source 1..17: mol_type = genomic DNA
aaatcccggacgagccc

SEQ ID NO: 68527 - DNA, 20 bp, Homo sapiens
  source 1..20: mol_type = genomic DNA
aaatcccggacgagccccca

SEQ ID NO: 68528 - DNA, 17 bp, Homo sapiens
  source 1..17: mol_type = genomic DNA
aacacaaagcacccaac

SEQ ID NO: 68529 - DNA, 21 bp, Homo sapiens
  source 1..21: mol_type = genomic DNA
aaccaaaacatcagattgtga

SEQ ID NO: 68530 - DNA, 18 bp, Homo sapiens
  source 1..18: mol_type = genomic DNA
aaccccgtccgtgcctcc

SEQ ID NO: 68531 - DNA, 19 bp, Homo sapiens
  source 1..19: mol_type = genomic DNA
aacctttttccaaggacac

SEQ ID NO: 68532 - DNA, 16 bp, Homo sapiens
  source 1..16: mol_type = genomic DNA
aacttaacttgaccgc

SEQ ID NO: 68533 - DNA, 20 bp, Homo sapiens
  source 1..20: mol_type = genomic DNA
aactttacagtcagaggttc

SEQ ID NO: 68534 - DNA, 23 bp, Homo sapiens
  source 1..23: mol_type = genomic DNA
aagatcacgggttcgaaccccgt

SEQ ID NO: 68535 - DNA, 19 bp, Homo sapiens
  source 1..19: mol_type = genomic DNA
aagatcgcgggttcgaacc

SEQ ID NO: 68536 - DNA, 20 bp, Homo sapiens
  source 1..20: mol_type = genomic DNA
aagatcgcgggttcgaaccc

SEQ ID NO: 68537 - DNA, 22 bp, Homo sapiens
  source 1..22: mol_type = genomic DNA
aagattgagggttcgaatccct

SEQ ID NO: 68538 - DNA, 24 bp, Homo sapiens
  source 1..24: mol_type = genomic DNA
aagattgagggttcgaatccctcc

SEQ ID NO: 68539 - DNA, 24 bp, Homo sapiens
  source 1..24: mol_type = genomic DNA
aagattgagggttcgaatcccttc

SEQ ID NO: 68540 - DNA, 19 bp, Homo sapiens
  source 1..19: mol_type = genomic DNA
aagattgagggttcgagtc

SEQ ID NO: 68541 - DNA, 19 bp, Homo sapiens
  source 1..19: mol_type = genomic DNA
aagcagcttcaaacctgcc

SEQ ID NO: 68542 - DNA, 21 bp, Homo sapiens
  source 1..21: mol_type = genomic DNA
aagcagcttcaaacctgccgg

SEQ ID NO: 68543 - DNA, 24 bp, Homo sapiens
  source 1..24: mol_type = genomic DNA
aaggctgcgtgttcgaatcacgtc

SEQ ID NO: 68544 - DNA, 21 bp, Homo sapiens
  source 1..21: mol_type = genomic DNA
aagggcttagcttaattaaag

SEQ ID NO: 68545 - DNA, 24 bp, Homo sapiens
  source 1..24: mol_type = genomic DNA
aagggcttagcttaattaaagtgg

SEQ ID NO: 68546 - DNA, 19 bp, Homo sapiens
  source 1..19: mol_type = genomic DNA
aaggtccccggttcgaaac

SEQ ID NO: 68547 - DNA, 24 bp, Homo sapiens
  source 1..24: mol_type = genomic DNA
aaggtccccggttcgaaaccgggc

SEQ ID NO: 68548 - DNA, 19 bp, Homo sapiens
  source 1..19: mol_type = genomic DNA
aaggtcgcgggttcgatcc

SEQ ID NO: 68549 - DNA, 24 bp, Homo sapiens
  source 1..24: mol_type = genomic DNA
aaggtcgcgggttcgatccccgta

SEQ ID NO: 68550 - DNA, 24 bp, Homo sapiens
  source 1..24: mol_type = genomic DNA
aaggttggtggttcgagcccaccc

SEQ ID NO: 68551 - DNA, 24 bp, Homo sapiens
  source 1..24: mol_type = genomic DNA
aaggttgtgggttcgagtcccacc

SEQ ID NO: 68552 - DNA, 17 bp, Homo sapiens
  source 1..17: mol_type = genomic DNA
aatccagaggttccggg

SEQ ID NO: 68553 - DNA, 16 bp, Homo sapiens
  source 1..16: mol_type = genomic DNA
aatcccggacgagccc

SEQ ID NO: 68554 - DNA, 16 bp, Homo sapiens
  source 1..16: mol_type = genomic DNA
aatccgggtgccccct

SEQ ID NO: 68555 - DNA, 24 bp, Homo sapiens
  source 1..24: mol_type = genomic DNA
aatgccgaggttgtgagttcgagc

SEQ ID NO: 68556 - DNA, 22 bp, Homo sapiens
  source 1..22: mol_type = genomic DNA
aatggataaggcatcagcctcc

SEQ ID NO: 68557 - DNA, 20 bp, Homo sapiens
  source 1..20: mol_type = genomic DNA
aattagaatcttagctttgg

SEQ ID NO: 68558 - DNA, 16 bp, Homo sapiens
  source 1..16: mol_type = genomic DNA
aattcaaaggttccgg

SEQ ID NO: 68559 - DNA, 17 bp, Homo sapiens
  source 1..17: mol_type = genomic DNA
aattcaaaggttccggg

SEQ ID NO: 68560 - DNA, 18 bp, Homo sapiens
  source 1..18: mol_type = genomic DNA
aattcaaaggttccgggt

SEQ ID NO: 68561 - DNA, 20 bp, Homo sapiens
  source 1..20: mol_type = genomic DNA
aattcaaaggttccgggttc

SEQ ID NO: 68562 - DNA, 21 bp, Homo sapiens
  source 1..21: mol_type = genomic DNA
aattcaaaggttccgggttcg

SEQ ID NO: 68563 - DNA, 18 bp, Homo sapiens
  source 1..18: mol_type = genomic DNA
aattttggtgcaactcca

SEQ ID NO: 68564 - DNA, 20 bp, Homo sapiens
  source 1..20: mol_type = genomic DNA
acaaaacgaatgatttcgac

SEQ ID NO: 68565 - DNA, 23 bp, Homo sapiens
  source 1..23: mol_type = genomic DNA
acaacattcaaaaaagagtacca

SEQ ID NO: 68566 - DNA, 18 bp, Homo sapiens
  source 1..18: mol_type = genomic DNA
acacgcgaaaggtccccg

SEQ ID NO: 68567 - DNA, 17 bp, Homo sapiens
  source 1..17: mol_type = genomic DNA
acaggagatcctgggtt

SEQ ID NO: 68568 - DNA, 18 bp, Homo sapiens
  source 1..18: mol_type = genomic DNA
acatatgtccgcgtgggt

SEQ ID NO: 68569 - DNA, 18 bp, Homo sapiens
  source 1..18: mol_type = genomic DNA
acatggtctagcggttag

SEQ ID NO: 68570 - DNA, 19 bp, Homo sapiens
  source 1..19: mol_type = genomic DNA
acatggtctagcggttagg

SEQ ID NO: 68571 - DNA, 18 bp, Homo sapiens
  source 1..18: mol_type = genomic DNA
accaaaacatcagattgt

SEQ ID NO: 68572 - DNA, 19 bp, Homo sapiens
  source 1..19: mol_type = genomic DNA
accgaagatcacgggttcg

SEQ ID NO: 68573 - DNA, 19 bp, Homo sapiens
  source 1..19: mol_type = genomic DNA
accgaagatcgcgggttcg

SEQ ID NO: 68574 - DNA, 18 bp, Homo sapiens
  source 1..18: mol_type = genomic DNA
accgccgcggcccgggtt

SEQ ID NO: 68575 - DNA, 18 bp, Homo sapiens
  source 1..18: mol_type = genomic DNA
accgttaacttccaatta

SEQ ID NO: 68576 - DNA, 20 bp, Homo sapiens
  source 1..20: mol_type = genomic DNA
accgttaacttccaattaac

SEQ ID NO: 68577 - DNA, 21 bp, Homo sapiens
  source 1..21: mol_type = genomic DNA
accgttaacttccaattaact

SEQ ID NO: 68578 - DNA, 17 bp, Homo sapiens
  source 1..17: mol_type = genomic DNA
acctttttccaaggaca

SEQ ID NO: 68579 - DNA, 16 bp, Homo sapiens
  source 1..16: mol_type = genomic DNA
acgaggccccgggttc

SEQ ID NO: 68580 - DNA, 16 bp, Homo sapiens
  source 1..16: mol_type = genomic DNA
acgaggtcccgggttc

SEQ ID NO: 68581 - DNA, 17 bp, Homo sapiens
  source 1..17: mol_type = genomic DNA
acgccaaggtcgcgggt

SEQ ID NO: 68582 - DNA, 18 bp, Homo sapiens
  source 1..18: mol_type = genomic DNA
acgccaaggtcgcgggtt

SEQ ID NO: 68583 - DNA, 20 bp, Homo sapiens
  source 1..20: mol_type = genomic DNA
acgccaaggtcgcgggttcg

SEQ ID NO: 68584 - DNA, 16 bp, Homo sapiens
  source 1..16: mol_type = genomic DNA
acgcgaaaggtccccg

SEQ ID NO: 68585 - DNA, 17 bp, Homo sapiens
  source 1..17: mol_type = genomic DNA
acgcgaaaggtccccgg

SEQ ID NO: 68586 - DNA, 18 bp, Homo sapiens
  source 1..18: mol_type = genomic DNA
acgcgaaaggtccccggt

SEQ ID NO: 68587 - DNA, 19 bp, Homo sapiens
  source 1..19: mol_type = genomic DNA
acgcgaaaggtccccggtt

SEQ ID NO: 68588 - DNA, 20 bp, Homo sapiens
  source 1..20: mol_type = genomic DNA
acgttcgcctcacacgcgaa

SEQ ID NO: 68589 - DNA, 16 bp, Homo sapiens
  source 1..16: mol_type = genomic DNA
actcaagttctggtct

SEQ ID NO: 68590 - DNA, 21 bp, Homo sapiens
  source 1..21: mol_type = genomic DNA
actcaagttctggtctccaat

SEQ ID NO: 68591 - DNA, 21 bp, Homo sapiens
  source 1..21: mol_type = genomic DNA
actcaagttctggtctccgga

SEQ ID NO: 68592 - DNA, 22 bp, Homo sapiens
  source 1..22: mol_type = genomic DNA
actcaagttctggtctccggat

SEQ ID NO: 68593 - DNA, 18 bp, Homo sapiens
  source 1..18: mol_type = genomic DNA
actccagatcagaaggct

SEQ ID NO: 68594 - DNA, 20 bp, Homo sapiens
  source 1..20: mol_type = genomic DNA
actccagatcagaaggctgc

SEQ ID NO: 68595 - DNA, 20 bp, Homo sapiens
  source 1..20: mol_type = genomic DNA
actctggactctgaatccag

SEQ ID NO: 68596 - DNA, 19 bp, Homo sapiens
  source 1..19: mol_type = genomic DNA
actctggactttgaatcca

SEQ ID NO: 68597 - DNA, 21 bp, Homo sapiens
  source 1..21: mol_type = genomic DNA
actctggactttgaatccagc

SEQ ID NO: 68598 - DNA, 18 bp, Homo sapiens
  source 1..18: mol_type = genomic DNA
acttaagatccaatggac

SEQ ID NO: 68599 - DNA, 19 bp, Homo sapiens
  source 1..19: mol_type = genomic DNA
acttcggatcagaagattg

SEQ ID NO: 68600 - DNA, 20 bp, Homo sapiens
  source 1..20: mol_type = genomic DNA
acttcggatcagaagattga

SEQ ID NO: 68601 - DNA, 20 bp, Homo sapiens
  source 1..20: mol_type = genomic DNA
acttcggatcagaagattgc

SEQ ID NO: 68602 - DNA, 25 bp, Homo sapiens
  source 1..25: mol_type = genomic DNA
actttgtcaaagttaaattataggc

SEQ ID NO: 68603 - DNA, 25 bp, Homo sapiens
  source 1..25: mol_type = genomic DNA
acttttaaaggataacagctatcca

SEQ ID NO: 68604 - DNA, 19 bp, Homo sapiens
  source 1..19: mol_type = genomic DNA
agaaagctcacaagaactg

SEQ ID NO: 68605 - DNA, 24 bp, Homo sapiens
  source 1..24: mol_type = genomic DNA
agaaagctcacaagaactgctaac

SEQ ID NO: 68606 - DNA, 19 bp, Homo sapiens
  source 1..19: mol_type = genomic DNA
agaaccaacacctctttac

SEQ ID NO: 68607 - DNA, 24 bp, Homo sapiens
  source 1..24: mol_type = genomic DNA
agaagattgagggttcgaatccct

SEQ ID NO: 68608 - DNA, 17 bp, Homo sapiens
  source 1..17: mol_type = genomic DNA
agaaggttgcgtgttca

SEQ ID NO: 68609 - DNA, 18 bp, Homo sapiens
  source 1..18: mol_type = genomic DNA
agacaggggttaggcctc

SEQ ID NO: 68610 - DNA, 20 bp, Homo sapiens
  source 1..20: mol_type = genomic DNA
agacgggctcacatcacccc

SEQ ID NO: 68611 - DNA, 17 bp, Homo sapiens
  source 1..17: mol_type = genomic DNA
agactcaagttctggtc

SEQ ID NO: 68612 - DNA, 16 bp, Homo sapiens
  source 1..16: mol_type = genomic DNA
agagaaccaacacctc

SEQ ID NO: 68613 - DNA, 16 bp, Homo sapiens
  source 1..16: mol_type = genomic DNA
agagcatgggactctt

SEQ ID NO: 68614 - DNA, 20 bp, Homo sapiens
  source 1..20: mol_type = genomic DNA
agagcatttgactgcagatc

SEQ ID NO: 68615 - DNA, 16 bp, Homo sapiens
  source 1..16: mol_type = genomic DNA
agaggtagcgggatcg

SEQ ID NO: 68616 - DNA, 16 bp, Homo sapiens
  source 1..16: mol_type = genomic DNA
agaggtccccggttca

SEQ ID NO: 68617 - DNA, 20 bp, Homo sapiens
  source 1..20: mol_type = genomic DNA
agaggtcgatggatcgaaac

SEQ ID NO: 68618 - DNA, 16 bp, Homo sapiens
  source 1..16: mol_type = genomic DNA
agatcaagaggtcccc

SEQ ID NO: 68619 - DNA, 18 bp, Homo sapiens
  source 1..18: mol_type = genomic DNA
agatcacgggttcgaacc

SEQ ID NO: 68620 - DNA, 19 bp, Homo sapiens
  source 1..19: mol_type = genomic DNA
agatcacgggttcgaaccc

SEQ ID NO: 68621 - DNA, 20 bp, Homo sapiens
  source 1..20: mol_type = genomic DNA
agatcacgggttcgaacccc

SEQ ID NO: 68622 - DNA, 22 bp, Homo sapiens
  source 1..22: mol_type = genomic DNA
agatcacgggttcgaaccccgt

SEQ ID NO: 68623 - DNA, 23 bp, Homo sapiens
  source 1..23: mol_type = genomic DNA
agatcacgggttcgaaccccgtc

SEQ ID NO: 68624 - DNA, 21 bp, Homo sapiens
  source 1..21: mol_type = genomic DNA
agatcagaaggctgcgtgttc

SEQ ID NO: 68625 - DNA, 19 bp, Homo sapiens
  source 1..19: mol_type = genomic DNA
agatcgcgggttcgaaccc

SEQ ID NO: 68626 - DNA, 20 bp, Homo sapiens
  source 1..20: mol_type = genomic DNA
agatcgcgggttcgaacccc

SEQ ID NO: 68627 - DNA, 21 bp, Homo sapiens
  source 1..21: mol_type = genomic DNA
agatcgcgggttcgaaccccg

SEQ ID NO: 68628 - DNA, 23 bp, Homo sapiens
  source 1..23: mol_type = genomic DNA
agatcgcgggttcgaaccccgtc

SEQ ID NO: 68629 - DNA, 18 bp, Homo sapiens
  source 1..18: mol_type = genomic DNA
agattccaggttcgactc

SEQ ID NO: 68630 - DNA, 19 bp, Homo sapiens
  source 1..19: mol_type = genomic DNA
agattccaggttcgactcc

SEQ ID NO: 68631 - DNA, 23 bp, Homo sapiens
  source 1..23: mol_type = genomic DNA
agattccaggttcgactcctggc

SEQ ID NO: 68632 - DNA, 18 bp, Homo sapiens
  source 1..18: mol_type = genomic DNA
agattctaggttcgactc

SEQ ID NO: 68633 - DNA, 19 bp, Homo sapiens
  source 1..19: mol_type = genomic DNA
agattctaggttcgactcc

SEQ ID NO: 68634 - DNA, 18 bp, Homo sapiens
  source 1..18: mol_type = genomic DNA
agattgagggttcgaatc

SEQ ID NO: 68635 - DNA, 20 bp, Homo sapiens
  source 1..20: mol_type = genomic DNA
agattgagggttcgaatccc

SEQ ID NO: 68636 - DNA, 23 bp, Homo sapiens
  source 1..23: mol_type = genomic DNA
agattgagggttcgaatccctcc

SEQ ID NO: 68637 - DNA, 23 bp, Homo sapiens
  source 1..23: mol_type = genomic DNA
agattgagggttcgaatcccttc

SEQ ID NO: 68638 - DNA, 19 bp, Homo sapiens
  source 1..19: mol_type = genomic DNA
agattgagggttcgagtcc

SEQ ID NO: 68639 - DNA, 24 bp, Homo sapiens
  source 1..24: mol_type = genomic DNA
agcactctggactctgaatccagc

SEQ ID NO: 68640 - DNA, 21 bp, Homo sapiens
  source 1..21: mol_type = genomic DNA
agcatgggactcttaatccca

SEQ ID NO: 68641 - DNA, 19 bp, Homo sapiens
  source 1..19: mol_type = genomic DNA
agcatttgactgcagatca

SEQ ID NO: 68642 - DNA, 21 bp, Homo sapiens
  source 1..21: mol_type = genomic DNA
agcatttgactgcagatcaag

SEQ ID NO: 68643 - DNA, 18 bp, Homo sapiens
  source 1..18: mol_type = genomic DNA
agcctccggagctgggga

SEQ ID NO: 68644 - DNA, 24 bp, Homo sapiens
  source 1..24: mol_type = genomic DNA
agcgatccgagttcaaatctcggt

SEQ ID NO: 68645 - DNA, 18 bp, Homo sapiens
  source 1..18: mol_type = genomic DNA
agcggaagcgtgctgggc

SEQ ID NO: 68646 - DNA, 20 bp, Homo sapiens
  source 1..20: mol_type = genomic DNA
agcggaagcgtgctgggccc

SEQ ID NO: 68647 - DNA, 20 bp, Homo sapiens
  source 1..20: mol_type = genomic DNA
agcggttaggattcctggtt

SEQ ID NO: 68648 - DNA, 19 bp, Homo sapiens
  source 1..19: mol_type = genomic DNA
agcgtggccgagcggtcta

SEQ ID NO: 68649 - DNA, 21 bp, Homo sapiens
  source 1..21: mol_type = genomic DNA
agcgtggccgagcggtctaag

SEQ ID NO: 68650 - DNA, 25 bp, Homo sapiens
  source 1..25: mol_type = genomic DNA
agcttaaacccccttatttctacca

SEQ ID NO: 68651 - DNA, 24 bp, Homo sapiens
  source 1..24: mol_type = genomic DNA
agcttcaaacctgccggggcttcc

SEQ ID NO: 68652 - DNA, 19 bp, Homo sapiens
  source 1..19: mol_type = genomic DNA
aggatggccgagcggtcta

SEQ ID NO: 68653 - DNA, 20 bp, Homo sapiens
  source 1..20: mol_type = genomic DNA
aggatggccgagcggtctaa

SEQ ID NO: 68654 - DNA, 23 bp, Homo sapiens
  source 1..23: mol_type = genomic DNA
aggatggccgagtggtctaaggc

SEQ ID NO: 68655 - DNA, 16 bp, Homo sapiens
  source 1..16: mol_type = genomic DNA
aggattcctggttttc

SEQ ID NO: 68656 - DNA, 23 bp, Homo sapiens
  source 1..23: mol_type = genomic DNA
aggccccgggttcaatccccggc

SEQ ID NO: 68657 - DNA, 19 bp, Homo sapiens
  source 1..19: mol_type = genomic DNA
aggcgtctgacttcggatc

SEQ ID NO: 68658 - DNA, 22 bp, Homo sapiens
  source 1..22: mol_type = genomic DNA
aggcgtctgacttcggatcaga

SEQ ID NO: 68659 - DNA, 25 bp, Homo sapiens
  source 1..25: mol_type = genomic DNA
agggattgtgggttcgagtcccacc

SEQ ID NO: 68660 - DNA, 21 bp, Homo sapiens
  source 1..21: mol_type = genomic DNA
aggggtagagcatttgactgc

SEQ ID NO: 68661 - DNA, 21 bp, Homo sapiens
  source 1..21: mol_type = genomic DNA
agggtccagggttcatgtccc

SEQ ID NO: 68662 - DNA, 18 bp, Homo sapiens
  source 1..18: mol_type = genomic DNA
agggtcgtgggttcgagc

SEQ ID NO: 68663 - DNA, 23 bp, Homo sapiens
  source 1..23: mol_type = genomic DNA
agggttcaagtccctgttcgggc

SEQ ID NO: 68664 - DNA, 25 bp, Homo sapiens
  source 1..25: mol_type = genomic DNA
agggttcaagtccctgttcgggcgc

SEQ ID NO: 68665 - DNA, 18 bp, Homo sapiens
  source 1..18: mol_type = genomic DNA
aggtccccggttcgaaac

SEQ ID NO: 68666 - DNA, 19 bp, Homo sapiens
  source 1..19: mol_type = genomic DNA
aggtccccggttcgaaacc

SEQ ID NO: 68667 - DNA, 23 bp, Homo sapiens
  source 1..23: mol_type = genomic DNA
aggtccccggttcgaaaccgggc

SEQ ID NO: 68668 - DNA, 23 bp, Homo sapiens
  source 1..23: mol_type = genomic DNA
aggtccccggttcgatcccgggc

SEQ ID NO: 68669 - DNA, 24 bp, Homo sapiens
  source 1..24: mol_type = genomic DNA
aggtcccgggttcaaatcccggac

SEQ ID NO: 68670 - DNA, 17 bp, Homo sapiens
  source 1..17: mol_type = genomic DNA
aggtcctgagttcgaac

SEQ ID NO: 68671 - DNA, 18 bp, Homo sapiens
  source 1..18: mol_type = genomic DNA
aggtcctgagttcgaacc

SEQ ID NO: 68672 - DNA, 19 bp, Homo sapiens
  source 1..19: mol_type = genomic DNA
aggtcctgagttcgaacct

SEQ ID NO: 68673 - DNA, 20 bp, Homo sapiens
  source 1..20: mol_type = genomic DNA
aggtcctgagttcgaacctc

SEQ ID NO: 68674 - DNA, 19 bp, Homo sapiens
  source 1..19: mol_type = genomic DNA
aggtcgatggatcgaaacc

SEQ ID NO: 68675 - DNA, 20 bp, Homo sapiens
  source 1..20: mol_type = genomic DNA
aggtcgatggatcgaaacca

SEQ ID NO: 68676 - DNA, 23 bp, Homo sapiens
  source 1..23: mol_type = genomic DNA
aggtcgatggatcgaaaccatcc

SEQ ID NO: 68677 - DNA, 18 bp, Homo sapiens
  source 1..18: mol_type = genomic DNA
aggtcgcgggttcgaacc

SEQ ID NO: 68678 - DNA, 18 bp, Homo sapiens
  source 1..18: mol_type = genomic DNA
aggtcgtgagttcgagcc

SEQ ID NO: 68679 - DNA, 19 bp, Homo sapiens
  source 1..19: mol_type = genomic DNA
aggtcgtgagttcgagcct

SEQ ID NO: 68680 - DNA, 24 bp, Homo sapiens
  source 1..24: mol_type = genomic DNA
aggtcgtgagttcgagcctcacac

SEQ ID NO: 68681 - DNA, 17 bp, Homo sapiens
  source 1..17: mol_type = genomic DNA
aggtcgtgagttcgatc

SEQ ID NO: 68682 - DNA, 18 bp, Homo sapiens
  source 1..18: mol_type = genomic DNA
aggtcgtgagttcgatcc

SEQ ID NO: 68683 - DNA, 19 bp, Homo sapiens
  source 1..19: mol_type = genomic DNA
aggtcgtgagttcgatcct

SEQ ID NO: 68684 - DNA, 24 bp, Homo sapiens
  source 1..24: mol_type = genomic DNA
aggtcgtgagttcgatcctcacac

SEQ ID NO: 68685 - DNA, 19 bp, Homo sapiens
  source 1..19: mol_type = genomic DNA
aggttccgggttcgagtcc

SEQ ID NO: 68686 - DNA, 20 bp, Homo sapiens
  source 1..20: mol_type = genomic DNA
aggttccgggttcgagtccc

SEQ ID NO: 68687 - DNA, 17 bp, Homo sapiens
  source 1..17: mol_type = genomic DNA
aggttcgactcctggct

SEQ ID NO: 68688 - DNA, 18 bp, Homo sapiens
  source 1..18: mol_type = genomic DNA
aggttcgagtcctgccgc

SEQ ID NO: 68689 - DNA, 18 bp, Homo sapiens
  source 1..18: mol_type = genomic DNA
aggttgcgtgttcaaatc

SEQ ID NO: 68690 - DNA, 23 bp, Homo sapiens
  source 1..23: mol_type = genomic DNA
aggttgcgtgttcaaatcacgtc

SEQ ID NO: 68691 - DNA, 23 bp, Homo sapiens
  source 1..23: mol_type = genomic DNA
aggttgcgtgttcaagtcacgtc

SEQ ID NO: 68692 - DNA, 17 bp, Homo sapiens
  source 1..17: mol_type = genomic DNA
aggttggtggttcgagc

SEQ ID NO: 68693 - DNA, 19 bp, Homo sapiens
  source 1..19: mol_type = genomic DNA
aggttggtggttcgagccc

SEQ ID NO: 68694 - DNA, 20 bp, Homo sapiens
  source 1..20: mol_type = genomic DNA
aggttggtggttcgagccca

SEQ ID NO: 68695 - DNA, 22 bp, Homo sapiens
  source 1..22: mol_type = genomic DNA
aggttggtggttcgagcccacc

SEQ ID NO: 68696 - DNA, 23 bp, Homo sapiens
  source 1..23: mol_type = genomic DNA
aggttggtggttcgagcccaccc

SEQ ID NO: 68697 - DNA, 23 bp, Homo sapiens
  source 1..23: mol_type = genomic DNA
aggttggtggttcgttcccaccc

SEQ ID NO: 68698 - DNA, 18 bp, Homo sapiens
  source 1..18: mol_type = genomic DNA
aggttgtgagttcgagcc

SEQ ID NO: 68699 - DNA, 20 bp, Homo sapiens
  source 1..20: mol_type = genomic DNA
aggttgtgagttcgagcctc

SEQ ID NO: 68700 - DNA, 23 bp, Homo sapiens
  source 1..23: mol_type = genomic DNA
aggttgtgagttcgagcctcacc

SEQ ID NO: 68701 - DNA, 18 bp, Homo sapiens
  source 1..18: mol_type = genomic DNA
aggttgtgagttcgatcc

SEQ ID NO: 68702 - DNA, 20 bp, Homo sapiens
  source 1..20: mol_type = genomic DNA
aggttgtgagttcgatcctc

SEQ ID NO: 68703 - DNA, 18 bp, Homo sapiens
  source 1..18: mol_type = genomic DNA
aggttgtgggttcgaatc

SEQ ID NO: 68704 - DNA, 21 bp, Homo sapiens
  source 1..21: mol_type = genomic DNA
aggttgtgggttcgaatccca

SEQ ID NO: 68705 - DNA, 22 bp, Homo sapiens
  source 1..22: mol_type = genomic DNA
aggttgtgggttcgaatcccac

SEQ ID NO: 68706 - DNA, 20 bp, Homo sapiens
  source 1..20: mol_type = genomic DNA
aggttgtgggttcgagtccc

SEQ ID NO: 68707 - DNA, 22 bp, Homo sapiens
  source 1..22: mol_type = genomic DNA
aggttgtgggttcgagtcccac

SEQ ID NO: 68708 - DNA, 23 bp, Homo sapiens
  source 1..23: mol_type = genomic DNA
agtaaggtcagctaaataagcta

SEQ ID NO: 68709 - DNA, 24 bp, Homo sapiens
  source 1..24: mol_type = genomic DNA
agtaaggtcagctaaataagctat

SEQ ID NO: 68710 - DNA, 24 bp, Homo sapiens
  source 1..24: mol_type = genomic DNA
agtaccgttaacttccaattaact

SEQ ID NO: 68711 - DNA, 16 bp, Homo sapiens
  source 1..16: mol_type = genomic DNA
agtcacgtcggggtca

SEQ ID NO: 68712 - DNA, 18 bp, Homo sapiens
  source 1..18: mol_type = genomic DNA
agtggggttttgcagtcc

SEQ ID NO: 68713 - DNA, 23 bp, Homo sapiens
  source 1..23: mol_type = genomic DNA
agtggtagaattctcgcctgcca

SEQ ID NO: 68714 - DNA, 20 bp, Homo sapiens
  source 1..20: mol_type = genomic DNA
agtggtagagcatttgactg

SEQ ID NO: 68715 - DNA, 22 bp, Homo sapiens
  source 1..22: mol_type = genomic DNA
agtggtagagcatttgactgca

SEQ ID NO: 68716 - DNA, 19 bp, Homo sapiens
  source 1..19: mol_type = genomic DNA
agtggtatcatgcaagatt

SEQ ID NO: 68717 - DNA, 18 bp, Homo sapiens
  source 1..18: mol_type = genomic DNA
agtggtcatcacgttcgc

SEQ ID NO: 68718 - DNA, 19 bp, Homo sapiens
  source 1..19: mol_type = genomic DNA
agtggtcatcacgttcgcc

SEQ ID NO: 68719 - DNA, 18 bp, Homo sapiens
  source 1..18: mol_type = genomic DNA
agtggttatcacgttcgc

SEQ ID NO: 68720 - DNA, 19 bp, Homo sapiens
  source 1..19: mol_type = genomic DNA
agtggttatcacgttcgcc

SEQ ID NO: 68721 - DNA, 21 bp, Homo sapiens
  source 1..21: mol_type = genomic DNA
agtggttatcacgttcgcctc

SEQ ID NO: 68722 - DNA, 23 bp, Homo sapiens
  source 1..23: mol_type = genomic DNA
agtggttatcacgttcgcctcac

SEQ ID NO: 68723 - DNA, 19 bp, Homo sapiens
  source 1..19: mol_type = genomic DNA
agttaaagactttttctct

SEQ ID NO: 68724 - DNA, 17 bp, Homo sapiens
  source 1..17: mol_type = genomic DNA
agttcaaatctcggtgg

SEQ ID NO: 68725 - DNA, 23 bp, Homo sapiens
  source 1..23: mol_type = genomic DNA
agttctggtctccggatggaggc

SEQ ID NO: 68726 - DNA, 25 bp, Homo sapiens
  source 1..25: mol_type = genomic DNA
agttgacccgggttcgattcccggc

SEQ ID NO: 68727 - DNA, 16 bp, Homo sapiens
  source 1..16: mol_type = genomic DNA
ataacagctatccatt

SEQ ID NO: 68728 - DNA, 25 bp, Homo sapiens
  source 1..25: mol_type = genomic DNA
ataagctatcgggcccataccccga

SEQ ID NO: 68729 - DNA, 16 bp, Homo sapiens
  source 1..16: mol_type = genomic DNA
atattgaattgcaaat

SEQ ID NO: 68730 - DNA, 19 bp, Homo sapiens
  source 1..19: mol_type = genomic DNA
atcaagaggtccctggttc

SEQ ID NO: 68731 - DNA, 20 bp, Homo sapiens
  source 1..20: mol_type = genomic DNA
atcacgggttcgaaccccgt

SEQ ID NO: 68732 - DNA, 19 bp, Homo sapiens
  source 1..19: mol_type = genomic DNA
atcagaagattgagggttc

SEQ ID NO: 68733 - DNA, 18 bp, Homo sapiens
  source 1..18: mol_type = genomic DNA
atcagattgtgaatctga

SEQ ID NO: 68734 - DNA, 17 bp, Homo sapiens
  source 1..17: mol_type = genomic DNA
atcattggtcgtggttg

SEQ ID NO: 68735 - DNA, 18 bp, Homo sapiens
  source 1..18: mol_type = genomic DNA
atcattggtcgtggttgt

SEQ ID NO: 68736 - DNA, 16 bp, Homo sapiens
  source 1..16: mol_type = genomic DNA
atcccatcctcgtcgc

SEQ ID NO: 68737 - DNA, 18 bp, Homo sapiens
  source 1..18: mol_type = genomic DNA
atcctgggttcgaatccc

SEQ ID NO: 68738 - DNA, 21 bp, Homo sapiens
  source 1..21: mol_type = genomic DNA
atcctgggttcgaatcccagc

SEQ ID NO: 68739 - DNA, 22 bp, Homo sapiens
  source 1..22: mol_type = genomic DNA
atcgaaaccatcctctgctacc

SEQ ID NO: 68740 - DNA, 17 bp, Homo sapiens
  source 1..17: mol_type = genomic DNA
atcgcgggttcgaaccc

SEQ ID NO: 68741 - DNA, 18 bp, Homo sapiens
  source 1..18: mol_type = genomic DNA
atcgcgggttcgaacccc

SEQ ID NO: 68742 - DNA, 19 bp, Homo sapiens
  source 1..19: mol_type = genomic DNA
atctaaaggtccctggttc

SEQ ID NO: 68743 - DNA, 22 bp, Homo sapiens
  source 1..22: mol_type = genomic DNA
atgaaaacctttttccaaggac

SEQ ID NO: 68744 - DNA, 23 bp, Homo sapiens
  source 1..23: mol_type = genomic DNA
atgaaaacctttttccaaggaca

SEQ ID NO: 68745 - DNA, 18 bp, Homo sapiens
  source 1..18: mol_type = genomic DNA
atgagactcttaatctca

SEQ ID NO: 68746 - DNA, 17 bp, Homo sapiens
  source 1..17: mol_type = genomic DNA
atgaggtcccgggttcg

SEQ ID NO: 68747 - DNA, 24 bp, Homo sapiens
  source 1..24: mol_type = genomic DNA
atgattctcgcttcgggtgcgaga

SEQ ID NO: 68748 - DNA, 24 bp, Homo sapiens
  source 1..24: mol_type = genomic DNA
atgattctcgctttgggtgcgaga

SEQ ID NO: 68749 - DNA, 16 bp, Homo sapiens
  source 1..16: mol_type = genomic DNA
atgcccccatgtctaa

SEQ ID NO: 68750 - DNA, 19 bp, Homo sapiens
  source 1..19: mol_type = genomic DNA
atgccgaggttgtgagttc

SEQ ID NO: 68751 - DNA, 17 bp, Homo sapiens
  source 1..17: mol_type = genomic DNA
atggataaggcgtctga

SEQ ID NO: 68752 - DNA, 17 bp, Homo sapiens
  source 1..17: mol_type = genomic DNA
atggatcgaaaccatcc

SEQ ID NO: 68753 - DNA, 19 bp, Homo sapiens
  source 1..19: mol_type = genomic DNA
atggatcgaaaccatcctc

SEQ ID NO: 68754 - DNA, 20 bp, Homo sapiens
  source 1..20: mol_type = genomic DNA
atggatcgaaaccatcctct

SEQ ID NO: 68755 - DNA, 17 bp, Homo sapiens
  source 1..17: mol_type = genomic DNA
atggccgagtggttaag

SEQ ID NO: 68756 - DNA, 18 bp, Homo sapiens
  source 1..18: mol_type = genomic DNA
atggccgagtggttaagg

SEQ ID NO: 68757 - DNA, 24 bp, Homo sapiens
  source 1..24: mol_type = genomic DNA
atgggtggttcagtggtagaattc

SEQ ID NO: 68758 - DNA, 16 bp, Homo sapiens
  source 1..16: mol_type = genomic DNA
atggtagagcgctcgc

SEQ ID NO: 68759 - DNA, 21 bp, Homo sapiens
  source 1..21: mol_type = genomic DNA
atggtggagttaaagactttt

SEQ ID NO: 68760 - DNA, 18 bp, Homo sapiens
  source 1..18: mol_type = genomic DNA
atggttagcactctggac

SEQ ID NO: 68761 - DNA, 25 bp, Homo sapiens
  source 1..25: mol_type = genomic DNA
atgtctaacaacatggctttctcac

SEQ ID NO: 68762 - DNA, 19 bp, Homo sapiens
  source 1..19: mol_type = genomic DNA
attagctcaaatggtagag

SEQ ID NO: 68763 - DNA, 18 bp, Homo sapiens
  source 1..18: mol_type = genomic DNA
attcaaaggttccgggtt

SEQ ID NO: 68764 - DNA, 20 bp, Homo sapiens
  source 1..20: mol_type = genomic DNA
attccggatcagaagattga

SEQ ID NO: 68765 - DNA, 18 bp, Homo sapiens
  source 1..18: mol_type = genomic DNA
attcctcttcttaacacc

SEQ ID NO: 68766 - DNA, 17 bp, Homo sapiens
  source 1..17: mol_type = genomic DNA
attctaggttcgactcc

SEQ ID NO: 68767 - DNA, 17 bp, Homo sapiens
  source 1..17: mol_type = genomic DNA
attctcgcctgccacgc

SEQ ID NO: 68768 - DNA, 21 bp, Homo sapiens
  source 1..21: mol_type = genomic DNA
attctcgcctgccacgcggga

SEQ ID NO: 68769 - DNA, 19 bp, Homo sapiens
  source 1..19: mol_type = genomic DNA
attctcgctggggcctcca

SEQ ID NO: 68770 - DNA, 21 bp, Homo sapiens
  source 1..21: mol_type = genomic DNA
attctcggtttgggtccgaga

SEQ ID NO: 68771 - DNA, 21 bp, Homo sapiens
  source 1..21: mol_type = genomic DNA
attgagggttcgaatcccttc

SEQ ID NO: 68772 - DNA, 19 bp, Homo sapiens
  source 1..19: mol_type = genomic DNA
attgcaaattcgaagaagc

SEQ ID NO: 68773 - DNA, 20 bp, Homo sapiens
  source 1..20: mol_type = genomic DNA
attgcaaattcgaagaagca

SEQ ID NO: 68774 - DNA, 21 bp, Homo sapiens
  source 1..21: mol_type = genomic DNA
attgcaggttcgagtcctgcc

SEQ ID NO: 68775 - DNA, 16 bp, Homo sapiens
  source 1..16: mol_type = genomic DNA
attggcctcctaagcc

SEQ ID NO: 68776 - DNA, 21 bp, Homo sapiens
  source 1..21: mol_type = genomic DNA
attgtgggttcgagtcccacc

SEQ ID NO: 68777 - DNA, 18 bp, Homo sapiens
  source 1..18: mol_type = genomic DNA
atttgactgcagatcaag

SEQ ID NO: 68778 - DNA, 22 bp, Homo sapiens
  source 1..22: mol_type = genomic DNA
caaaacatcagattgtgaatct

SEQ ID NO: 68779 - DNA, 22 bp, Homo sapiens
  source 1..22: mol_type = genomic DNA
caacttacacttaggagatttc

SEQ ID NO: 68780 - DNA, 18 bp, Homo sapiens
  source 1..18: mol_type = genomic DNA
caagaggtccccggttca

SEQ ID NO: 68781 - DNA, 18 bp, Homo sapiens
  source 1..18: mol_type = genomic DNA
caagaggtccctggttca

SEQ ID NO: 68782 - DNA, 16 bp, Homo sapiens
  source 1..16: mol_type = genomic DNA
caaggtcgcgggttcg

SEQ ID NO: 68783 - DNA, 17 bp, Homo sapiens
  source 1..17: mol_type = genomic DNA
caagttctggtctccaa

SEQ ID NO: 68784 - DNA, 19 bp, Homo sapiens
  source 1..19: mol_type = genomic DNA
caattaactagttttgaca

SEQ ID NO: 68785 - DNA, 24 bp, Homo sapiens
  source 1..24: mol_type = genomic DNA
caattaactagttttgacaacatt

SEQ ID NO: 68786 - DNA, 19 bp, Homo sapiens
  source 1..19: mol_type = genomic DNA
cacatggtctagcggttag

SEQ ID NO: 68787 - DNA, 19 bp, Homo sapiens
  source 1..19: mol_type = genomic DNA
cacgcgggagaccggggtt

SEQ ID NO: 68788 - DNA, 20 bp, Homo sapiens
  source 1..20: mol_type = genomic DNA
cacgcgggagaccggggttc

SEQ ID NO: 68789 - DNA, 17 bp, Homo sapiens
  source 1..17: mol_type = genomic DNA
cactctggactctgaat

SEQ ID NO: 68790 - DNA, 19 bp, Homo sapiens
  source 1..19: mol_type = genomic DNA
cactctggactttgaatcc

SEQ ID NO: 68791 - DNA, 20 bp, Homo sapiens
  source 1..20: mol_type = genomic DNA
cactctggactttgaatcca

SEQ ID NO: 68792 - DNA, 22 bp, Homo sapiens
  source 1..22: mol_type = genomic DNA
cactctggactttgaatccagc

SEQ ID NO: 68793 - DNA, 16 bp, Homo sapiens
  source 1..16: mol_type = genomic DNA
cagaagattctaggtt

SEQ ID NO: 68794 - DNA, 18 bp, Homo sapiens
  source 1..18: mol_type = genomic DNA
cagaagattctaggttcg

SEQ ID NO: 68795 - DNA, 17 bp, Homo sapiens
  source 1..17: mol_type = genomic DNA
cagaaggtcctgggttc

SEQ ID NO: 68796 - DNA, 16 bp, Homo sapiens
  source 1..16: mol_type = genomic DNA
cagagcatttgactgc

SEQ ID NO: 68797 - DNA, 19 bp, Homo sapiens
  source 1..19: mol_type = genomic DNA
cagcctccggagctgggga

SEQ ID NO: 68798 - DNA, 19 bp, Homo sapiens
  source 1..19: mol_type = genomic DNA
cagcggaagcgtgctgggc

SEQ ID NO: 68799 - DNA, 18 bp, Homo sapiens
  source 1..18: mol_type = genomic DNA
cagcttcaaacctgccgg

SEQ ID NO: 68800 - DNA, 16 bp, Homo sapiens
  source 1..16: mol_type = genomic DNA
caggatggccgagcgg

SEQ ID NO: 68801 - DNA, 22 bp, Homo sapiens
  source 1..22: mol_type = genomic DNA
cagggttcaagtccctgttcgg

SEQ ID NO: 68802 - DNA, 21 bp, Homo sapiens
  source 1..21: mol_type = genomic DNA
cagtcggtagagcatgagacc

SEQ ID NO: 68803 - DNA, 22 bp, Homo sapiens
  source 1..22: mol_type = genomic DNA
cagtggtagagcatttgactgc

SEQ ID NO: 68804 - DNA, 19 bp, Homo sapiens
  source 1..19: mol_type = genomic DNA
catatcattggtcgtggtt

SEQ ID NO: 68805 - DNA, 18 bp, Homo sapiens
  source 1..18: mol_type = genomic DNA
catattgaattgcaaatt

SEQ ID NO: 68806 - DNA, 19 bp, Homo sapiens
  source 1..19: mol_type = genomic DNA
catgagactcttaatctca

SEQ ID NO: 68807 - DNA, 18 bp, Homo sapiens
  source 1..18: mol_type = genomic DNA
catgcccccatgtctaac

SEQ ID NO: 68808 - DNA, 18 bp, Homo sapiens
  source 1..18: mol_type = genomic DNA
catgggactcttaatccc

SEQ ID NO: 68809 - DNA, 23 bp, Homo sapiens
  source 1..23: mol_type = genomic DNA
catgtctaacaacatggctttct

SEQ ID NO: 68810 - DNA, 24 bp, Homo sapiens
  source 1..24: mol_type = genomic DNA
cattcttgcgacccgggttcgatt

SEQ ID NO: 68811 - DNA, 19 bp, Homo sapiens
  source 1..19: mol_type = genomic DNA
cattggacttctaattcaa

SEQ ID NO: 68812 - DNA, 17 bp, Homo sapiens
  source 1..17: mol_type = genomic DNA
cattggcctcctaagcc

SEQ ID NO: 68813 - DNA, 18 bp, Homo sapiens
  source 1..18: mol_type = genomic DNA
cattggcctcctaagcca

SEQ ID NO: 68814 - DNA, 18 bp, Homo sapiens
  source 1..18: mol_type = genomic DNA
cattggtcgtggttgtag

SEQ ID NO: 68815 - DNA, 18 bp, Homo sapiens
  source 1..18: mol_type = genomic DNA
catttcataactttgtca

SEQ ID NO: 68816 - DNA, 17 bp, Homo sapiens
  source 1..17: mol_type = genomic DNA
catttgactgcagatca

SEQ ID NO: 68817 - DNA, 23 bp, Homo sapiens
  source 1..23: mol_type = genomic DNA
ccaacacctctttacagtgacca

SEQ ID NO: 68818 - DNA, 20 bp, Homo sapiens
  source 1..20: mol_type = genomic DNA
ccaacttacacttaggagat

SEQ ID NO: 68819 - DNA, 21 bp, Homo sapiens
  source 1..21: mol_type = genomic DNA
ccacatggtctagcggttagg

SEQ ID NO: 68820 - DNA, 16 bp, Homo sapiens
  source 1..16: mol_type = genomic DNA
ccagaggttccgggtt

SEQ ID NO: 68821 - DNA, 18 bp, Homo sapiens
  source 1..18: mol_type = genomic DNA
ccagaggttccgggttcg

SEQ ID NO: 68822 - DNA, 17 bp, Homo sapiens
  source 1..17: mol_type = genomic DNA
ccagatcagaaggctgc

SEQ ID NO: 68823 - DNA, 17 bp, Homo sapiens
  source 1..17: mol_type = genomic DNA
ccagatcagaaggttgc

SEQ ID NO: 68824 - DNA, 18 bp, Homo sapiens
  source 1..18: mol_type = genomic DNA
ccaggggtcgcgagttca

SEQ ID NO: 68825 - DNA, 19 bp, Homo sapiens
  source 1..19: mol_type = genomic DNA
ccatagtgtagtggttatc

SEQ ID NO: 68826 - DNA, 20 bp, Homo sapiens
  source 1..20: mol_type = genomic DNA
ccattcttgcgacccgggtt

SEQ ID NO: 68827 - DNA, 20 bp, Homo sapiens
  source 1..20: mol_type = genomic DNA
ccattggtcttaggccccaa

SEQ ID NO: 68828 - DNA, 18 bp, Homo sapiens
  source 1..18: mol_type = genomic DNA
cccataacccagaggtcg

SEQ ID NO: 68829 - DNA, 20 bp, Homo sapiens
  source 1..20: mol_type = genomic DNA
cccataacccagaggtcgat

SEQ ID NO: 68830 - DNA, 22 bp, Homo sapiens
  source 1..22: mol_type = genomic DNA
cccattcttgcgacccgggttc

SEQ ID NO: 68831 - DNA, 16 bp, Homo sapiens
  source 1..16: mol_type = genomic DNA
cccggcagagatgcca

SEQ ID NO: 68832 - DNA, 19 bp, Homo sapiens
  source 1..19: mol_type = genomic DNA
cccgggttcgattcccggc

SEQ ID NO: 68833 - DNA, 18 bp, Homo sapiens
  source 1..18: mol_type = genomic DNA
ccctggtggtctagtggt

SEQ ID NO: 68834 - DNA, 19 bp, Homo sapiens
  source 1..19: mol_type = genomic DNA
ccgaaaggttggtggttcg

SEQ ID NO: 68835 - DNA, 18 bp, Homo sapiens
  source 1..18: mol_type = genomic DNA
ccgaagatcgcgggttcg

SEQ ID NO: 68836 - DNA, 16 bp, Homo sapiens
  source 1..16: mol_type = genomic DNA
ccgagaggtcccgggt

SEQ ID NO: 68837 - DNA, 17 bp, Homo sapiens
  source 1..17: mol_type = genomic DNA
ccgagaggtcccgggtt

SEQ ID NO: 68838 - DNA, 18 bp, Homo sapiens
  source 1..18: mol_type = genomic DNA
ccgagaggtcccgggttc

SEQ ID NO: 68839 - DNA, 17 bp, Homo sapiens
  source 1..17: mol_type = genomic DNA
ccgaggttgtgagttcg

SEQ ID NO: 68840 - DNA, 18 bp, Homo sapiens
  source 1..18: mol_type = genomic DNA
ccgccgcggcccgggttc

SEQ ID NO: 68841 - DNA, 17 bp, Homo sapiens
  source 1..17: mol_type = genomic DNA
ccggagctggggattgt

SEQ ID NO: 68842 - DNA, 18 bp, Homo sapiens
  source 1..18: mol_type = genomic DNA
ccggatagctcagtcggt

SEQ ID NO: 68843 - DNA, 21 bp, Homo sapiens
  source 1..21: mol_type = genomic DNA
ccggatcagaagattgagggt

SEQ ID NO: 68844 - DNA, 18 bp, Homo sapiens
  source 1..18: mol_type = genomic DNA
ccggttagctcagtcggc

SEQ ID NO: 68845 - DNA, 18 bp, Homo sapiens
  source 1..18: mol_type = genomic DNA
ccggttagctcagttggt

SEQ ID NO: 68846 - DNA, 17 bp, Homo sapiens
  source 1..17: mol_type = genomic DNA
ccggttcgaaaccgggc

SEQ ID NO: 68847 - DNA, 18 bp, Homo sapiens
  source 1..18: mol_type = genomic DNA
ccgtagtgtagtggttat

SEQ ID NO: 68848 - DNA, 16 bp, Homo sapiens
  source 1..16: mol_type = genomic DNA
cctcacctggagcacc

SEQ ID NO: 68849 - DNA, 19 bp, Homo sapiens
  source 1..19: mol_type = genomic DNA
cctgccacgcgggaggccc

SEQ ID NO: 68850 - DNA, 16 bp, Homo sapiens
  source 1..16: mol_type = genomic DNA
cctgccggggcttcca

SEQ ID NO: 68851 - DNA, 19 bp, Homo sapiens
  source 1..19: mol_type = genomic DNA
cctgggttcgaatcccagc

SEQ ID NO: 68852 - DNA, 17 bp, Homo sapiens
  source 1..17: mol_type = genomic DNA
ccttaggtcgctggttc

SEQ ID NO: 68853 - DNA, 20 bp, Homo sapiens
  source 1..20: mol_type = genomic DNA
ccttccaagcagttgacccg

SEQ ID NO: 68854 - DNA, 23 bp, Homo sapiens
  source 1..23: mol_type = genomic DNA
ccttccaagcagttgacccgggt

SEQ ID NO: 68855 - DNA, 18 bp, Homo sapiens
  source 1..18: mol_type = genomic DNA
ccttcgatagctcagctg

SEQ ID NO: 68856 - DNA, 18 bp, Homo sapiens
  source 1..18: mol_type = genomic DNA
ccttttaagttaaagatt

SEQ ID NO: 68857 - DNA, 17 bp, Homo sapiens
  source 1..17: mol_type = genomic DNA
cctttttccaaggacac

SEQ ID NO: 68858 - DNA, 18 bp, Homo sapiens
  source 1..18: mol_type = genomic DNA
cgaaaggtccccggttcg

SEQ ID NO: 68859 - DNA, 18 bp, Homo sapiens
  source 1..18: mol_type = genomic DNA
cgaaaggttggtggttcg

SEQ ID NO: 68860 - DNA, 21 bp, Homo sapiens
  source 1..21: mol_type = genomic DNA
cgaaccccgtccgtgcctcca

SEQ ID NO: 68861 - DNA, 17 bp, Homo sapiens
  source 1..17: mol_type = genomic DNA
cgaagatcgcgggttcg

SEQ ID NO: 68862 - DNA, 16 bp, Homo sapiens
  source 1..16: mol_type = genomic DNA
cgagaggtcccgggtt

SEQ ID NO: 68863 - DNA, 19 bp, Homo sapiens
  source 1..19: mol_type = genomic DNA
cgagcccacccagggacgc

SEQ ID NO: 68864 - DNA, 16 bp, Homo sapiens
  source 1..16: mol_type = genomic DNA
cgaggttgtgagttcg

SEQ ID NO: 68865 - DNA, 17 bp, Homo sapiens
  source 1..17: mol_type = genomic DNA
cgagttcaaatctcgct

SEQ ID NO: 68866 - DNA, 17 bp, Homo sapiens
  source 1..17: mol_type = genomic DNA
cgagttcaaatctcggt

SEQ ID NO: 68867 - DNA, 22 bp, Homo sapiens
  source 1..22: mol_type = genomic DNA
cgatccgagttcaaatctcggt

SEQ ID NO: 68868 - DNA, 18 bp, Homo sapiens
  source 1..18: mol_type = genomic DNA
cgcagcaacctcggttcg

SEQ ID NO: 68869 - DNA, 16 bp, Homo sapiens
  source 1..16: mol_type = genomic DNA
cgccaaggtcgcgggt

SEQ ID NO: 68870 - DNA, 20 bp, Homo sapiens
  source 1..20: mol_type = genomic DNA
cgcccggctagctcagtcgg

SEQ ID NO: 68871 - DNA, 16 bp, Homo sapiens
  source 1..16: mol_type = genomic DNA
cgcctgtcacgcggga

SEQ ID NO: 68872 - DNA, 19 bp, Homo sapiens
  source 1..19: mol_type = genomic DNA
cgcgggttcgatccccgta

SEQ ID NO: 68873 - DNA, 18 bp, Homo sapiens
  source 1..18: mol_type = genomic DNA
cgcttcgggtgcgagagg

SEQ ID NO: 68874 - DNA, 20 bp, Homo sapiens
  source 1..20: mol_type = genomic DNA
cggaagcgtgctgggcccat

SEQ ID NO: 68875 - DNA, 18 bp, Homo sapiens
  source 1..18: mol_type = genomic DNA
cggagctggggattgtgg

SEQ ID NO: 68876 - DNA, 18 bp, Homo sapiens
  source 1..18: mol_type = genomic DNA
cggatcagaagattccag

SEQ ID NO: 68877 - DNA, 18 bp, Homo sapiens
  source 1..18: mol_type = genomic DNA
cggatcagaagattctag

SEQ ID NO: 68878 - DNA, 21 bp, Homo sapiens
  source 1..21: mol_type = genomic DNA
cggctagctcagtcggtagag

SEQ ID NO: 68879 - DNA, 16 bp, Homo sapiens
  source 1..16: mol_type = genomic DNA
cgggagaccggggttc

SEQ ID NO: 68880 - DNA, 19 bp, Homo sapiens
  source 1..19: mol_type = genomic DNA
cggggatgtagctcagtgg

SEQ ID NO: 68881 - DNA, 19 bp, Homo sapiens
  source 1..19: mol_type = genomic DNA
cgggggtgtagctcagtgg

SEQ ID NO: 68882 - DNA, 18 bp, Homo sapiens
  source 1..18: mol_type = genomic DNA
cgggtgcgagaggtcccg

SEQ ID NO: 68883 - DNA, 19 bp, Homo sapiens
  source 1..19: mol_type = genomic DNA
cgggtgcgagaggtcccgg

SEQ ID NO: 68884 - DNA, 22 bp, Homo sapiens
  source 1..22: mol_type = genomic DNA
cgggttcgatccccgtacgggc

SEQ ID NO: 68885 - DNA, 19 bp, Homo sapiens
  source 1..19: mol_type = genomic DNA
cggtagagcatttgactgc

SEQ ID NO: 68886 - DNA, 19 bp, Homo sapiens
  source 1..19: mol_type = genomic DNA
cggtctaaggcgctgcgtt

SEQ ID NO: 68887 - DNA, 17 bp, Homo sapiens
  source 1..17: mol_type = genomic DNA
cggttagctcagtcggc

SEQ ID NO: 68888 - DNA, 16 bp, Homo sapiens
  source 1..16: mol_type = genomic DNA
cggttagctcagttgg

SEQ ID NO: 68889 - DNA, 18 bp, Homo sapiens
  source 1..18: mol_type = genomic DNA
cggttaggattcctggtt

SEQ ID NO: 68890 - DNA, 21 bp, Homo sapiens
  source 1..21: mol_type = genomic DNA
cggttatcacgtctgctttac

SEQ ID NO: 68891 - DNA, 18 bp, Homo sapiens
  source 1..18: mol_type = genomic DNA
cggttcaaatccgggtgc

SEQ ID NO: 68892 - DNA, 16 bp, Homo sapiens
  source 1..16: mol_type = genomic DNA
cggttcgatcccgggc

SEQ ID NO: 68893 - DNA, 20 bp, Homo sapiens
  source 1..20: mol_type = genomic DNA
cgtctctgtggcgcaatcgg

SEQ ID NO: 68894 - DNA, 18 bp, Homo sapiens
  source 1..18: mol_type = genomic DNA
cgtgctgggcccataacc

SEQ ID NO: 68895 - DNA, 21 bp, Homo sapiens
  source 1..21: mol_type = genomic DNA
cgtgctgggcccataacccag

SEQ ID NO: 68896 - DNA, 18 bp, Homo sapiens
  source 1..18: mol_type = genomic DNA
cgtggccgagtggttaag

SEQ ID NO: 68897 - DNA, 18 bp, Homo sapiens
  source 1..18: mol_type = genomic DNA
cgttaacttccaattaac

SEQ ID NO: 68898 - DNA, 19 bp, Homo sapiens
  source 1..19: mol_type = genomic DNA
cgttaacttccaattaact

SEQ ID NO: 68899 - DNA, 19 bp, Homo sapiens
  source 1..19: mol_type = genomic DNA
cgttcgcctcacacgcgaa

SEQ ID NO: 68900 - DNA, 17 bp, Homo sapiens
  source 1..17: mol_type = genomic DNA
ctaaaggtccctggttc

SEQ ID NO: 68901 - DNA, 19 bp, Homo sapiens
  source 1..19: mol_type = genomic DNA
ctaatccattgtgctttgc

SEQ ID NO: 68902 - DNA, 24 bp, Homo sapiens
  source 1..24: mol_type = genomic DNA
ctaatggataaggcatcagcctcc

SEQ ID NO: 68903 - DNA, 18 bp, Homo sapiens
  source 1..18: mol_type = genomic DNA
ctaattcaaaggttccgg

SEQ ID NO: 68904 - DNA, 19 bp, Homo sapiens
  source 1..19: mol_type = genomic DNA
ctaattcaaaggttccggg

SEQ ID NO: 68905 - DNA, 18 bp, Homo sapiens
  source 1..18: mol_type = genomic DNA
ctaattcaaaggttgtgg

SEQ ID NO: 68906 - DNA, 22 bp, Homo sapiens
  source 1..22: mol_type = genomic DNA
ctagcggttaggattcctggtt

SEQ ID NO: 68907 - DNA, 18 bp, Homo sapiens
  source 1..18: mol_type = genomic DNA
ctagctcagtcggtagag

SEQ ID NO: 68908 - DNA, 18 bp, Homo sapiens
  source 1..18: mol_type = genomic DNA
ctaggggtatgattctcg

SEQ ID NO: 68909 - DNA, 22 bp, Homo sapiens
  source 1..22: mol_type = genomic DNA
ctagtggttaggattcggcgct

SEQ ID NO: 68910 - DNA, 22 bp, Homo sapiens
  source 1..22: mol_type = genomic DNA
ctatccattggtcttaggcccc

SEQ ID NO: 68911 - DNA, 24 bp, Homo sapiens
  source 1..24: mol_type = genomic DNA
ctatccattggtcttaggccccaa

SEQ ID NO: 68912 - DNA, 19 bp, Homo sapiens
  source 1..19: mol_type = genomic DNA
ctcacacgcgaaaggtccc

SEQ ID NO: 68913 - DNA, 20 bp, Homo sapiens
  source 1..20: mol_type = genomic DNA
ctcacacgcgaaaggtcccc

SEQ ID NO: 68914 - DNA, 18 bp, Homo sapiens
  source 1..18: mol_type = genomic DNA
ctcagtggtagagcattt

SEQ ID NO: 68915 - DNA, 19 bp, Homo sapiens
  source 1..19: mol_type = genomic DNA
ctccagatcagaaggctgc

SEQ ID NO: 68916 - DNA, 19 bp, Homo sapiens
  source 1..19: mol_type = genomic DNA
ctccagatcagaaggttgc

SEQ ID NO: 68917 - DNA, 19 bp, Homo sapiens
  source 1..19: mol_type = genomic DNA
ctctgaatccagcgatccg

SEQ ID NO: 68918 - DNA, 21 bp, Homo sapiens
  source 1..21: mol_type = genomic DNA
ctctgaatccagcgatccgag

SEQ ID NO: 68919 - DNA, 24 bp, Homo sapiens
  source 1..24: mol_type = genomic DNA
ctctgaatccagcgatccgagttc

SEQ ID NO: 68920 - DNA, 18 bp, Homo sapiens
  source 1..18: mol_type = genomic DNA
ctctggactctgaatcca

SEQ ID NO: 68921 - DNA, 17 bp, Homo sapiens
  source 1..17: mol_type = genomic DNA
ctctggactttgaatcc

SEQ ID NO: 68922 - DNA, 20 bp, Homo sapiens
  source 1..20: mol_type = genomic DNA
ctctggactttgaatccagc

SEQ ID NO: 68923 - DNA, 19 bp, Homo sapiens
  source 1..19: mol_type = genomic DNA
ctcttaatctcagggtcgt

SEQ ID NO: 68924 - DNA, 16 bp, Homo sapiens
  source 1..16: mol_type = genomic DNA
ctgaaggtcgtgagtt

SEQ ID NO: 68925 - DNA, 16 bp, Homo sapiens
  source 1..16: mol_type = genomic DNA
ctgaatccagcgatcc

SEQ ID NO: 68926 - DNA, 21 bp, Homo sapiens
  source 1..21: mol_type = genomic DNA
ctgaatccagcgatccgagtt

SEQ ID NO: 68927 - DNA, 19 bp, Homo sapiens
  source 1..19: mol_type = genomic DNA
ctgactacggatcagaaga

SEQ ID NO: 68928 - DNA, 16 bp, Homo sapiens
  source 1..16: mol_type = genomic DNA
ctgactccagatcaga

SEQ ID NO: 68929 - DNA, 17 bp, Homo sapiens
  source 1..17: mol_type = genomic DNA
ctgactccagatcagaa

SEQ ID NO: 68930 - DNA, 20 bp, Homo sapiens
  source 1..20: mol_type = genomic DNA
ctgactccagatcagaaggc

SEQ ID NO: 68931 - DNA, 21 bp, Homo sapiens
  source 1..21: mol_type = genomic DNA
ctgactccagatcagaaggct

SEQ ID NO: 68932 - DNA, 23 bp, Homo sapiens
  source 1..23: mol_type = genomic DNA
ctgactccagatcagaaggctgc

SEQ ID NO: 68933 - DNA, 23 bp, Homo sapiens
  source 1..23: mol_type = genomic DNA
ctgactccagatcagaaggttgc

SEQ ID NO: 68934 - DNA, 16 bp, Homo sapiens
  source 1..16: mol_type = genomic DNA
ctgacttcggatcaga

SEQ ID NO: 68935 - DNA, 17 bp, Homo sapiens
  source 1..17: mol_type = genomic DNA
ctgacttcggatcagaa

SEQ ID NO: 68936 - DNA, 16 bp, Homo sapiens
  source 1..16: mol_type = genomic DNA
ctgattccggatcaga

SEQ ID NO: 68937 - DNA, 18 bp, Homo sapiens
  source 1..18: mol_type = genomic DNA
ctgattccggatcagaag

SEQ ID NO: 68938 - DNA, 18 bp, Homo sapiens
  source 1..18: mol_type = genomic DNA
ctgcagatcaagaggtcc

SEQ ID NO: 68939 - DNA, 19 bp, Homo sapiens
  source 1..19: mol_type = genomic DNA
ctgcagatcaagaggtccc

SEQ ID NO: 68940 - DNA, 20 bp, Homo sapiens
  source 1..20: mol_type = genomic DNA
ctgcagatcaagaggtccct

SEQ ID NO: 68941 - DNA, 20 bp, Homo sapiens
  source 1..20: mol_type = genomic DNA
ctgccacgcgggaggcccgg

SEQ ID NO: 68942 - DNA, 18 bp, Homo sapiens
  source 1..18: mol_type = genomic DNA
ctggactttgaatccagc

SEQ ID NO: 68943 - DNA, 19 bp, Homo sapiens
  source 1..19: mol_type = genomic DNA
ctggactttgaatccagcg

SEQ ID NO: 68944 - DNA, 20 bp, Homo sapiens
  source 1..20: mol_type = genomic DNA
ctggactttgaatccagcga

SEQ ID NO: 68945 - DNA, 16 bp, Homo sapiens
  source 1..16: mol_type = genomic DNA
ctggggattgtgggtt

SEQ ID NO: 68946 - DNA, 24 bp, Homo sapiens
  source 1..24: mol_type = genomic DNA
ctggggattgtgggttcgagtccc

SEQ ID NO: 68947 - DNA, 17 bp, Homo sapiens
  source 1..17: mol_type = genomic DNA
ctgggtagctcagtcgg

SEQ ID NO: 68948 - DNA, 18 bp, Homo sapiens
  source 1..18: mol_type = genomic DNA
ctgggttcgaatcccagc

SEQ ID NO: 68949 - DNA, 16 bp, Homo sapiens
  source 1..16: mol_type = genomic DNA
ctggtggtctagtggc

SEQ ID NO: 68950 - DNA, 16 bp, Homo sapiens
  source 1..16: mol_type = genomic DNA
ctggtggtctagtggt

SEQ ID NO: 68951 - DNA, 16 bp, Homo sapiens
  source 1..16: mol_type = genomic DNA
ctggtgtagtggtatc

SEQ ID NO: 68952 - DNA, 24 bp, Homo sapiens
  source 1..24: mol_type = genomic DNA
ctggtgtagtggtatcatgcaaga

SEQ ID NO: 68953 - DNA, 19 bp, Homo sapiens
  source 1..19: mol_type = genomic DNA
ctgtcacgcgggagaccgg

SEQ ID NO: 68954 - DNA, 20 bp, Homo sapiens
  source 1..20: mol_type = genomic DNA
cttaacacaaagcacccaac

SEQ ID NO: 68955 - DNA, 18 bp, Homo sapiens
  source 1..18: mol_type = genomic DNA
cttaagatccaatggaca

SEQ ID NO: 68956 - DNA, 18 bp, Homo sapiens
  source 1..18: mol_type = genomic DNA
cttaagatccaatggatt

SEQ ID NO: 68957 - DNA, 16 bp, Homo sapiens
  source 1..16: mol_type = genomic DNA
cttacacttaggagat

SEQ ID NO: 68958 - DNA, 20 bp, Homo sapiens
  source 1..20: mol_type = genomic DNA
cttagcattaaccttttaag

SEQ ID NO: 68959 - DNA, 22 bp, Homo sapiens
  source 1..22: mol_type = genomic DNA
cttccaagcagttgacccgggt

SEQ ID NO: 68960 - DNA, 20 bp, Homo sapiens
  source 1..20: mol_type = genomic DNA
cttcggatcagaagattgca

SEQ ID NO: 68961 - DNA, 18 bp, Homo sapiens
  source 1..18: mol_type = genomic DNA
ctttcaccgccgcggccc

SEQ ID NO: 68962 - DNA, 18 bp, Homo sapiens
  source 1..18: mol_type = genomic DNA
ctttgaatccagcgatcc

SEQ ID NO: 68963 - DNA, 19 bp, Homo sapiens
  source 1..19: mol_type = genomic DNA
ctttgaatccagcgatccg

SEQ ID NO: 68964 - DNA, 20 bp, Homo sapiens
  source 1..20: mol_type = genomic DNA
ctttgaatccagcgatccga

SEQ ID NO: 68965 - DNA, 21 bp, Homo sapiens
  source 1..21: mol_type = genomic DNA
ctttgaatccagcgatccgag

SEQ ID NO: 68966 - DNA, 24 bp, Homo sapiens
  source 1..24: mol_type = genomic DNA
ctttgaatccagcgatccgagttc

SEQ ID NO: 68967 - DNA, 25 bp, Homo sapiens
  source 1..25: mol_type = genomic DNA
cttttaagttaaagattaagagaac

SEQ ID NO: 68968 - DNA, 20 bp, Homo sapiens
  source 1..20: mol_type = genomic DNA
gaaccccgtccgtgcctcca

SEQ ID NO: 68969 - DNA, 25 bp, Homo sapiens
  source 1..25: mol_type = genomic DNA
gaagattccaggttcgactcctggc

SEQ ID NO: 68970 - DNA, 22 bp, Homo sapiens
  source 1..22: mol_type = genomic DNA
gaagattgagggttcgagtccc

SEQ ID NO: 68971 - DNA, 23 bp, Homo sapiens
  source 1..23: mol_type = genomic DNA
gaagattgagggttcgagtccct

SEQ ID NO: 68972 - DNA, 25 bp, Homo sapiens
  source 1..25: mol_type = genomic DNA
gaagattgagggttcgagtcccttc

SEQ ID NO: 68973 - DNA, 25 bp, Homo sapiens
  source 1..25: mol_type = genomic DNA
gaagattgcaggttcgagtcctgcc

SEQ ID NO: 68974 - DNA, 18 bp, Homo sapiens
  source 1..18: mol_type = genomic DNA
gaatccagcgatccgagt

SEQ ID NO: 68975 - DNA, 16 bp, Homo sapiens
  source 1..16: mol_type = genomic DNA
gaatctgacaacagag

SEQ ID NO: 68976 - DNA, 24 bp, Homo sapiens
  source 1..24: mol_type = genomic DNA
gacaacattcaaaaaagagtacca

SEQ ID NO: 68977 - DNA, 22 bp, Homo sapiens
  source 1..22: mol_type = genomic DNA
gacccgggttcgattcccgggc

SEQ ID NO: 68978 - DNA, 18 bp, Homo sapiens
  source 1..18: mol_type = genomic DNA
gactcaagttctggtctc

SEQ ID NO: 68979 - DNA, 19 bp, Homo sapiens
  source 1..19: mol_type = genomic DNA
gactcaagttctggtctcc

SEQ ID NO: 68980 - DNA, 21 bp, Homo sapiens
  source 1..21: mol_type = genomic DNA
gactccagatcagaaggctgc

SEQ ID NO: 68981 - DNA, 21 bp, Homo sapiens
  source 1..21: mol_type = genomic DNA
gactccagatcagaaggttgc

SEQ ID NO: 68982 - DNA, 17 bp, Homo sapiens
  source 1..17: mol_type = genomic DNA
gactctgaatccagcga

SEQ ID NO: 68983 - DNA, 19 bp, Homo sapiens
  source 1..19: mol_type = genomic DNA
gacttaagatccaatggac

SEQ ID NO: 68984 - DNA, 16 bp, Homo sapiens
  source 1..16: mol_type = genomic DNA
gacttcggatcagaag

SEQ ID NO: 68985 - DNA, 20 bp, Homo sapiens
  source 1..20: mol_type = genomic DNA
gacttcggatcagaagattg

SEQ ID NO: 68986 - DNA, 17 bp, Homo sapiens
  source 1..17: mol_type = genomic DNA
gagaggtcccgggttca

SEQ ID NO: 68987 - DNA, 19 bp, Homo sapiens
  source 1..19: mol_type = genomic DNA
gagcatgagactcttaatc

SEQ ID NO: 68988 - DNA, 19 bp, Homo sapiens
  source 1..19: mol_type = genomic DNA
gaggtcgatggatcgaaac

SEQ ID NO: 68989 - DNA, 25 bp, Homo sapiens
  source 1..25: mol_type = genomic DNA
gaggttccgggttcgagtcccggca

SEQ ID NO: 68990 - DNA, 17 bp, Homo sapiens
  source 1..17: mol_type = genomic DNA
gagtatccccgcctgtc

SEQ ID NO: 68991 - DNA, 18 bp, Homo sapiens
  source 1..18: mol_type = genomic DNA
gagttcaaatctcggtgg

SEQ ID NO: 68992 - DNA, 22 bp, Homo sapiens
  source 1..22: mol_type = genomic DNA
gagttcgagtctcggtggaacc

SEQ ID NO: 68993 - DNA, 20 bp, Homo sapiens
  source 1..20: mol_type = genomic DNA
gatagctcagttggtagagc

SEQ ID NO: 68994 - DNA, 16 bp, Homo sapiens
  source 1..16: mol_type = genomic DNA
gatccaatggacatat

SEQ ID NO: 68995 - DNA, 21 bp, Homo sapiens
  source 1..21: mol_type = genomic DNA
gatccgagttcaaatctcggt

SEQ ID NO: 68996 - DNA, 22 bp, Homo sapiens
  source 1..22: mol_type = genomic DNA
gattctcgctttgggtgcgaga

SEQ ID NO: 68997 - DNA, 22 bp, Homo sapiens
  source 1..22: mol_type = genomic DNA
gattctcggtttgggtccgaga

SEQ ID NO: 68998 - DNA, 22 bp, Homo sapiens
  source 1..22: mol_type = genomic DNA
gattgtgggttcgagtcccacc

SEQ ID NO: 68999 - DNA, 16 bp, Homo sapiens
  source 1..16: mol_type = genomic DNA
gatttaggctccagtc

SEQ ID NO: 69000 - DNA, 17 bp, Homo sapiens
  source 1..17: mol_type = genomic DNA
gatttgcgttcagttga

SEQ ID NO: 69001 - DNA, 20 bp, Homo sapiens
  source 1..20: mol_type = genomic DNA
gcacccaacttacacttagg

SEQ ID NO: 69002 - DNA, 23 bp, Homo sapiens
  source 1..23: mol_type = genomic DNA
gcactctggactctgaatccagc

SEQ ID NO: 69003 - DNA, 20 bp, Homo sapiens
  source 1..20: mol_type = genomic DNA
gcatgggactcttaatccca

SEQ ID NO: 69004 - DNA, 19 bp, Homo sapiens
  source 1..19: mol_type = genomic DNA
gcatgggactcttaatctc

SEQ ID NO: 69005 - DNA, 19 bp, Homo sapiens
  source 1..19: mol_type = genomic DNA
gcattggacttctaattca

SEQ ID NO: 69006 - DNA, 20 bp, Homo sapiens
  source 1..20: mol_type = genomic DNA
gcattggacttctaattcaa

SEQ ID NO: 69007 - DNA, 18 bp, Homo sapiens
  source 1..18: mol_type = genomic DNA
gcattggcctcctaagcc

SEQ ID NO: 69008 - DNA, 19 bp, Homo sapiens
  source 1..19: mol_type = genomic DNA
gcattggcctcctaagcca

SEQ ID NO: 69009 - DNA, 18 bp, Homo sapiens
  source 1..18: mol_type = genomic DNA
gccaaggtcgcgggttcg

SEQ ID NO: 69010 - DNA, 16 bp, Homo sapiens
  source 1..16: mol_type = genomic DNA
gccagggattgtgggt

SEQ ID NO: 69011 - DNA, 19 bp, Homo sapiens
  source 1..19: mol_type = genomic DNA
gcccagctagctcagtcgg

SEQ ID NO: 69012 - DNA, 25 bp, Homo sapiens
  source 1..25: mol_type = genomic DNA
gcccggctagctcagtcggtagagc

SEQ ID NO: 69013 - DNA, 20 bp, Homo sapiens
  source 1..20: mol_type = genomic DNA
gcccgggttcgattcccggc

SEQ ID NO: 69014 - DNA, 23 bp, Homo sapiens
  source 1..23: mol_type = genomic DNA
gccgaaatagctcagttgggaga

SEQ ID NO: 69015 - DNA, 16 bp, Homo sapiens
  source 1..16: mol_type = genomic DNA
gcctccttagcgcagt

SEQ ID NO: 69016 - DNA, 20 bp, Homo sapiens
  source 1..20: mol_type = genomic DNA
gcctggatagctcagtcggt

SEQ ID NO: 69017 - DNA, 19 bp, Homo sapiens
  source 1..19: mol_type = genomic DNA
gcctggctagctcagtcgg

SEQ ID NO: 69018 - DNA, 20 bp, Homo sapiens
  source 1..20: mol_type = genomic DNA
gcctgggtagctcagtcggt

SEQ ID NO: 69019 - DNA, 17 bp, Homo sapiens
  source 1..17: mol_type = genomic DNA
gcgaaaggtccccggtt

SEQ ID NO: 69020 - DNA, 18 bp, Homo sapiens
  source 1..18: mol_type = genomic DNA
gcgaaaggtccccggttc

SEQ ID NO: 69021 - DNA, 19 bp, Homo sapiens
  source 1..19: mol_type = genomic DNA
gcgaaaggtccccggttcg

SEQ ID NO: 69022 - DNA, 16 bp, Homo sapiens
  source 1..16: mol_type = genomic DNA
gcgagaggtagcggga

SEQ ID NO: 69023 - DNA, 18 bp, Homo sapiens
  source 1..18: mol_type = genomic DNA
gcgagaggtagcgggatc

SEQ ID NO: 69024 - DNA, 18 bp, Homo sapiens
  source 1..18: mol_type = genomic DNA
gcgagaggtcccgggttc

SEQ ID NO: 69025 - DNA, 19 bp, Homo sapiens
  source 1..19: mol_type = genomic DNA
gcgcaggttcgaaccctgc

SEQ ID NO: 69026 - DNA, 19 bp, Homo sapiens
  source 1..19: mol_type = genomic DNA
gcggaagcgtgctgggccc

SEQ ID NO: 69027 - DNA, 18 bp, Homo sapiens
  source 1..18: mol_type = genomic DNA
gcgggttcgatccccgta

SEQ ID NO: 69028 - DNA, 19 bp, Homo sapiens
  source 1..19: mol_type = genomic DNA
gcggttaggattcctggtt

SEQ ID NO: 69029 - DNA, 20 bp, Homo sapiens
  source 1..20: mol_type = genomic DNA
gcgtctgacttcggatcaga

SEQ ID NO: 69030 - DNA, 20 bp, Homo sapiens
  source 1..20: mol_type = genomic DNA
gcgtctgattccggatcaga

SEQ ID NO: 69031 - DNA, 19 bp, Homo sapiens
  source 1..19: mol_type = genomic DNA
gcgtgctgggcccataacc

SEQ ID NO: 69032 - DNA, 20 bp, Homo sapiens
  source 1..20: mol_type = genomic DNA
gcgtgctgggcccataaccc

SEQ ID NO: 69033 - DNA, 22 bp, Homo sapiens
  source 1..22: mol_type = genomic DNA
gcgtgctgggcccataacccag

SEQ ID NO: 69034 - DNA, 20 bp, Homo sapiens
  source 1..20: mol_type = genomic DNA
gctaatccattgtgctttgc

SEQ ID NO: 69035 - DNA, 21 bp, Homo sapiens
  source 1..21: mol_type = genomic DNA
gctccagtggcgcaatcggtt

SEQ ID NO: 69036 - DNA, 19 bp, Homo sapiens
  source 1..19: mol_type = genomic DNA
gctctcaccgccgcggccc

SEQ ID NO: 69037 - DNA, 18 bp, Homo sapiens
  source 1..18: mol_type = genomic DNA
gctggggattgtgggttc

SEQ ID NO: 69038 - DNA, 20 bp, Homo sapiens
  source 1..20: mol_type = genomic DNA
gctgtgatggccgagtggtt

SEQ ID NO: 69039 - DNA, 25 bp, Homo sapiens
  source 1..25: mol_type = genomic DNA
gctgtgatggccgagtggttaaggc

SEQ ID NO: 69040 - DNA, 20 bp, Homo sapiens
  source 1..20: mol_type = genomic DNA
gcttctgtagtgtagtggtt

SEQ ID NO: 69041 - DNA, 19 bp, Homo sapiens
  source 1..19: mol_type = genomic DNA
ggaagcgtgctgggcccat

SEQ ID NO: 69042 - DNA, 16 bp, Homo sapiens
  source 1..16: mol_type = genomic DNA
ggactttgaatccagc

SEQ ID NO: 69043 - DNA, 18 bp, Homo sapiens
  source 1..18: mol_type = genomic DNA
ggactttgaatccagcga

SEQ ID NO: 69044 - DNA, 16 bp, Homo sapiens
  source 1..16: mol_type = genomic DNA
ggagctggggattgtg

SEQ ID NO: 69045 - DNA, 19 bp, Homo sapiens
  source 1..19: mol_type = genomic DNA
ggataaggcatcagcctcc

SEQ ID NO: 69046 - DNA, 18 bp, Homo sapiens
  source 1..18: mol_type = genomic DNA
ggatagctcagtcggtag

SEQ ID NO: 69047 - DNA, 21 bp, Homo sapiens
  source 1..21: mol_type = genomic DNA
ggatagctcagtcggtagagc

SEQ ID NO: 69048 - DNA, 21 bp, Homo sapiens
  source 1..21: mol_type = genomic DNA
ggattgtgggttcgagtccca

SEQ ID NO: 69049 - DNA, 23 bp, Homo sapiens
  source 1..23: mol_type = genomic DNA
ggattgtgggttcgagtcccacc

SEQ ID NO: 69050 - DNA, 23 bp, Homo sapiens
  source 1..23: mol_type = genomic DNA
ggattgtgggttcgagtcccatc

SEQ ID NO: 69051 - DNA, 19 bp, Homo sapiens
  source 1..19: mol_type = genomic DNA
ggcattggcctcctaagcc

SEQ ID NO: 69052 - DNA, 17 bp, Homo sapiens
  source 1..17: mol_type = genomic DNA
ggcccataccccgaaaa

SEQ ID NO: 69053 - DNA, 22 bp, Homo sapiens
  source 1..22: mol_type = genomic DNA
ggccccgggttcgatccccggc

SEQ ID NO: 69054 - DNA, 21 bp, Homo sapiens
  source 1..21: mol_type = genomic DNA
ggcccgggttcgattcccggc

SEQ ID NO: 69055 - DNA, 19 bp, Homo sapiens
  source 1..19: mol_type = genomic DNA
ggccctgtggcttagctgg

SEQ ID NO: 69056 - DNA, 20 bp, Homo sapiens
  source 1..20: mol_type = genomic DNA
ggccctgtggcttagctggt

SEQ ID NO: 69057 - DNA, 19 bp, Homo sapiens
  source 1..19: mol_type = genomic DNA
ggcgccgtggcttagttgg

SEQ ID NO: 69058 - DNA, 17 bp, Homo sapiens
  source 1..17: mol_type = genomic DNA
ggcgcggtggccaagtg

SEQ ID NO: 69059 - DNA, 18 bp, Homo sapiens
  source 1..18: mol_type = genomic DNA
ggcgtctgacttcggatc

SEQ ID NO: 69060 - DNA, 21 bp, Homo sapiens
  source 1..21: mol_type = genomic DNA
ggcgtctgacttcggatcaga

SEQ ID NO: 69061 - DNA, 21 bp, Homo sapiens
  source 1..21: mol_type = genomic DNA
ggcgtctgattccggatcaga

SEQ ID NO: 69062 - DNA, 21 bp, Homo sapiens
  source 1..21: mol_type = genomic DNA
ggcgtgggttcgaatcccacc

SEQ ID NO: 69063 - DNA, 16 bp, Homo sapiens
  source 1..16: mol_type = genomic DNA
ggctagctcagtcggt

SEQ ID NO: 69064 - DNA, 18 bp, Homo sapiens
  source 1..18: mol_type = genomic DNA
ggctagctcagtcggtag

SEQ ID NO: 69065 - DNA, 16 bp, Homo sapiens
  source 1..16: mol_type = genomic DNA
ggctccgtggcttagc

SEQ ID NO: 69066 - DNA, 20 bp, Homo sapiens
  source 1..20: mol_type = genomic DNA
ggctccgtggcttagctggt

SEQ ID NO: 69067 - DNA, 17 bp, Homo sapiens
  source 1..17: mol_type = genomic DNA
gggatgtagctcagtgg

SEQ ID NO: 69068 - DNA, 22 bp, Homo sapiens
  source 1..22: mol_type = genomic DNA
gggattgtgggttcgagtccca

SEQ ID NO: 69069 - DNA, 24 bp, Homo sapiens
  source 1..24: mol_type = genomic DNA
gggattgtgggttcgagtcccacc

SEQ ID NO: 69070 - DNA, 17 bp, Homo sapiens
  source 1..17: mol_type = genomic DNA
gggccagtggcgcaatg

SEQ ID NO: 69071 - DNA, 16 bp, Homo sapiens
  source 1..16: mol_type = genomic DNA
ggggaattagctcaag

SEQ ID NO: 69072 - DNA, 18 bp, Homo sapiens
  source 1..18: mol_type = genomic DNA
gggggcatagctcagtgg

SEQ ID NO: 69073 - DNA, 18 bp, Homo sapiens
  source 1..18: mol_type = genomic DNA
gggggtatagctcagggg

SEQ ID NO: 69074 - DNA, 18 bp, Homo sapiens
  source 1..18: mol_type = genomic DNA
ggggtatgattctcgctt

SEQ ID NO: 69075 - DNA, 17 bp, Homo sapiens
  source 1..17: mol_type = genomic DNA
ggggtgtagctcagtgg

SEQ ID NO: 69076 - DNA, 18 bp, Homo sapiens
  source 1..18: mol_type = genomic DNA
gggtatgattctcgcttc

SEQ ID NO: 69077 - DNA, 20 bp, Homo sapiens
  source 1..20: mol_type = genomic DNA
gggtatgattctcgcttcgg

SEQ ID NO: 69078 - DNA, 20 bp, Homo sapiens
  source 1..20: mol_type = genomic DNA
gggtatgattctcgctttgg

SEQ ID NO: 69079 - DNA, 21 bp, Homo sapiens
  source 1..21: mol_type = genomic DNA
gggtcgtgggttcgagcccca

SEQ ID NO: 69080 - DNA, 17 bp, Homo sapiens
  source 1..17: mol_type = genomic DNA
gggttcaaatcccggac

SEQ ID NO: 69081 - DNA, 22 bp, Homo sapiens
  source 1..22: mol_type = genomic DNA
gggttcgagccccacgttgggc

SEQ ID NO: 69082 - DNA, 16 bp, Homo sapiens
  source 1..16: mol_type = genomic DNA
gggttcgagtcccatc

SEQ ID NO: 69083 - DNA, 16 bp, Homo sapiens
  source 1..16: mol_type = genomic DNA
gggttcgagtcccggc

SEQ ID NO: 69084 - DNA, 17 bp, Homo sapiens
  source 1..17: mol_type = genomic DNA
gggttcgattcccggtc

SEQ ID NO: 69085 - DNA, 19 bp, Homo sapiens
  source 1..19: mol_type = genomic DNA
gggttcgattcccggtcag

SEQ ID NO: 69086 - DNA, 19 bp, Homo sapiens
  source 1..19: mol_type = genomic DNA
ggtagagcatcagactttt

SEQ ID NO: 69087 - DNA, 22 bp, Homo sapiens
  source 1..22: mol_type = genomic DNA
ggtagagcatgggactcttaat

SEQ ID NO: 69088 - DNA, 23 bp, Homo sapiens
  source 1..23: mol_type = genomic DNA
ggtagagcatgggactcttaatc

SEQ ID NO: 69089 - DNA, 24 bp, Homo sapiens
  source 1..24: mol_type = genomic DNA
ggtagagcatgggactcttaatcc

SEQ ID NO: 69090 - DNA, 25 bp, Homo sapiens
  source 1..25: mol_type = genomic DNA
ggtagagcatgggactcttaatccc

SEQ ID NO: 69091 - DNA, 19 bp, Homo sapiens
  source 1..19: mol_type = genomic DNA
ggtagcgtggccgagtggt

SEQ ID NO: 69092 - DNA, 21 bp, Homo sapiens
  source 1..21: mol_type = genomic DNA
ggtagcgtggccgagtggtct

SEQ ID NO: 69093 - DNA, 21 bp, Homo sapiens
  source 1..21: mol_type = genomic DNA
ggtagtgtggccgagcggtct

SEQ ID NO: 69094 - DNA, 18 bp, Homo sapiens
  source 1..18: mol_type = genomic DNA
ggtatgattctcgctttg

SEQ ID NO: 69095 - DNA, 22 bp, Homo sapiens
  source 1..22: mol_type = genomic DNA
ggtccccggttcgaaaccgggc

SEQ ID NO: 69096 - DNA, 23 bp, Homo sapiens
  source 1..23: mol_type = genomic DNA
ggtcccgggttcaaatcccggac

SEQ ID NO: 69097 - DNA, 17 bp, Homo sapiens
  source 1..17: mol_type = genomic DNA
ggtccgagaggtcccgg

SEQ ID NO: 69098 - DNA, 19 bp, Homo sapiens
  source 1..19: mol_type = genomic DNA
ggtcctgagttcgaacctc

SEQ ID NO: 69099 - DNA, 22 bp, Homo sapiens
  source 1..22: mol_type = genomic DNA
ggtcgcgggttcgaaccccgta

SEQ ID NO: 69100 - DNA, 18 bp, Homo sapiens
  source 1..18: mol_type = genomic DNA
ggtcgcgggttcgatccc

SEQ ID NO: 69101 - DNA, 19 bp, Homo sapiens
  source 1..19: mol_type = genomic DNA
ggtcgtgagttcgagcctc

SEQ ID NO: 69102 - DNA, 19 bp, Homo sapiens
  source 1..19: mol_type = genomic DNA
ggtcgtgagttcgatcctc

SEQ ID NO: 69103 - DNA, 22 bp, Homo sapiens
  source 1..22: mol_type = genomic DNA
ggtcgtgggttcgagccccacg

SEQ ID NO: 69104 - DNA, 16 bp, Homo sapiens
  source 1..16: mol_type = genomic DNA
ggtgcgagaggtcccg

SEQ ID NO: 69105 - DNA, 16 bp, Homo sapiens
  source 1..16: mol_type = genomic DNA
ggttagcactctggac

SEQ ID NO: 69106 - DNA, 21 bp, Homo sapiens
  source 1..21: mol_type = genomic DNA
ggttagcactctggactctga

SEQ ID NO: 69107 - DNA, 16 bp, Homo sapiens
  source 1..16: mol_type = genomic DNA
ggttagctcagtcggc

SEQ ID NO: 69108 - DNA, 18 bp, Homo sapiens
  source 1..18: mol_type = genomic DNA
ggttatcacgttcgcctc

SEQ ID NO: 69109 - DNA, 20 bp, Homo sapiens
  source 1..20: mol_type = genomic DNA
ggttatcacgttcgcctcac

SEQ ID NO: 69110 - DNA, 17 bp, Homo sapiens
  source 1..17: mol_type = genomic DNA
ggttcaaatccgggtgc

SEQ ID NO: 69111 - DNA, 18 bp, Homo sapiens
  source 1..18: mol_type = genomic DNA
ggttcaaatccgggtgcc

SEQ ID NO: 69112 - DNA, 19 bp, Homo sapiens
  source 1..19: mol_type = genomic DNA
ggttcaaatccgggtgccc

SEQ ID NO: 69113 - DNA, 18 bp, Homo sapiens
  source 1..18: mol_type = genomic DNA
ggttcagtggtagaattc

SEQ ID NO: 69114 - DNA, 18 bp, Homo sapiens
  source 1..18: mol_type = genomic DNA
ggttccatagtgtagcgg

SEQ ID NO: 69115 - DNA, 18 bp, Homo sapiens
  source 1..18: mol_type = genomic DNA
ggttcgaaaccgggcgga

SEQ ID NO: 69116 - DNA, 16 bp, Homo sapiens
  source 1..16: mol_type = genomic DNA
ggttcgaaccccgtcc

SEQ ID NO: 69117 - DNA, 16 bp, Homo sapiens
  source 1..16: mol_type = genomic DNA
ggttcgatccccgtac

SEQ ID NO: 69118 - DNA, 19 bp, Homo sapiens
  source 1..19: mol_type = genomic DNA
ggttgtgagttcgagcctc

SEQ ID NO: 69119 - DNA, 19 bp, Homo sapiens
  source 1..19: mol_type = genomic DNA
ggttgtgagttcgatcctc

SEQ ID NO: 69120 - DNA, 19 bp, Homo sapiens
  source 1..19: mol_type = genomic DNA
ggttgtgggttcgaatccc

SEQ ID NO: 69121 - DNA, 22 bp, Homo sapiens
  source 1..22: mol_type = genomic DNA
ggttgtgggttcgaatcccacc

SEQ ID NO: 69122 - DNA, 22 bp, Homo sapiens
  source 1..22: mol_type = genomic DNA
ggttgtgggttcgagtcccacc

SEQ ID NO: 69123 - DNA, 18 bp, Homo sapiens
  source 1..18: mol_type = genomic DNA
ggtttccccgcgcaggtt

SEQ ID NO: 69124 - DNA, 23 bp, Homo sapiens
  source 1..23: mol_type = genomic DNA
gtaaacaggagatcctgggttcg

SEQ ID NO: 69125 - DNA, 20 bp, Homo sapiens
  source 1..20: mol_type = genomic DNA
gtaaaccgaagatcacgggt

SEQ ID NO: 69126 - DNA, 18 bp, Homo sapiens
  source 1..18: mol_type = genomic DNA
gtaaaccgaagatcgcgg

SEQ ID NO: 69127 - DNA, 20 bp, Homo sapiens
  source 1..20: mol_type = genomic DNA
gtaaaccgaagatcgcgggt

SEQ ID NO: 69128 - DNA, 18 bp, Homo sapiens
  source 1..18: mol_type = genomic DNA
gtaatggttagcactctg

SEQ ID NO: 69129 - DNA, 18 bp, Homo sapiens
  source 1..18: mol_type = genomic DNA
gtagagcatcagactttt

SEQ ID NO: 69130 - DNA, 19 bp, Homo sapiens
  source 1..19: mol_type = genomic DNA
gtagagcatgagactctta

SEQ ID NO: 69131 - DNA, 20 bp, Homo sapiens
  source 1..20: mol_type = genomic DNA
gtagagcatgagactcttaa

SEQ ID NO: 69132 - DNA, 24 bp, Homo sapiens
  source 1..24: mol_type = genomic DNA
gtagagcatgggactcttaatccc

SEQ ID NO: 69133 - DNA, 17 bp, Homo sapiens
  source 1..17: mol_type = genomic DNA
gtagagcatttgactgc

SEQ ID NO: 69134 - DNA, 16 bp, Homo sapiens
  source 1..16: mol_type = genomic DNA
gtatgattctcgcttc

SEQ ID NO: 69135 - DNA, 20 bp, Homo sapiens
  source 1..20: mol_type = genomic DNA
gtcaggatggccgagtggtc

SEQ ID NO: 69136 - DNA, 24 bp, Homo sapiens
  source 1..24: mol_type = genomic DNA
gtcaggatggccgagtggtctaag

SEQ ID NO: 69137 - DNA, 21 bp, Homo sapiens
  source 1..21: mol_type = genomic DNA
gtccccggttcgaaaccgggc

SEQ ID NO: 69138 - DNA, 21 bp, Homo sapiens
  source 1..21: mol_type = genomic DNA
gtccccggttcgatcccgggc

SEQ ID NO: 69139 - DNA, 21 bp, Homo sapiens
  source 1..21: mol_type = genomic DNA
gtcccgggttcaatccccggc

SEQ ID NO: 69140 - DNA, 21 bp, Homo sapiens
  source 1..21: mol_type = genomic DNA
gtccttgtagtataaactaat

SEQ ID NO: 69141 - DNA, 21 bp, Homo sapiens
  source 1..21: mol_type = genomic DNA
gtcgcgggttcgaaccccgta

SEQ ID NO: 69142 - DNA, 19 bp, Homo sapiens
  source 1..19: mol_type = genomic DNA
gtcgcgggttcgatccccg

SEQ ID NO: 69143 - DNA, 22 bp, Homo sapiens
  source 1..22: mol_type = genomic DNA
gtcggtagagcatcagactttt

SEQ ID NO: 69144 - DNA, 19 bp, Homo sapiens
  source 1..19: mol_type = genomic DNA
gtctctgtggcacaatcgg

SEQ ID NO: 69145 - DNA, 21 bp, Homo sapiens
  source 1..21: mol_type = genomic DNA
gtctctgtggcgcaatcggtt

SEQ ID NO: 69146 - DNA, 18 bp, Homo sapiens
  source 1..18: mol_type = genomic DNA
gtgagtatccccgcctgt

SEQ ID NO: 69147 - DNA, 19 bp, Homo sapiens
  source 1..19: mol_type = genomic DNA
gtgagtatccccgcctgtc

SEQ ID NO: 69148 - DNA, 16 bp, Homo sapiens
  source 1..16: mol_type = genomic DNA
gtgcgagaggtcccgg

SEQ ID NO: 69149 - DNA, 18 bp, Homo sapiens
  source 1..18: mol_type = genomic DNA
gtgctgggcccataaccc

SEQ ID NO: 69150 - DNA, 20 bp, Homo sapiens
  source 1..20: mol_type = genomic DNA
gtgctgggcccataacccag

SEQ ID NO: 69151 - DNA, 18 bp, Homo sapiens
  source 1..18: mol_type = genomic DNA
gtggccgagtggtctaag

SEQ ID NO: 69152 - DNA, 16 bp, Homo sapiens
  source 1..16: mol_type = genomic DNA
gtggtatgattctcgc

SEQ ID NO: 69153 - DNA, 17 bp, Homo sapiens
  source 1..17: mol_type = genomic DNA
gtggtcatcacgttcgc

SEQ ID NO: 69154 - DNA, 17 bp, Homo sapiens
  source 1..17: mol_type = genomic DNA
gtggttaaggcattgga

SEQ ID NO: 69155 - DNA, 21 bp, Homo sapiens
  source 1..21: mol_type = genomic DNA
gtggttagtactctgcgttgt

SEQ ID NO: 69156 - DNA, 17 bp, Homo sapiens
  source 1..17: mol_type = genomic DNA
gtggttatcacgttcgc

SEQ ID NO: 69157 - DNA, 18 bp, Homo sapiens
  source 1..18: mol_type = genomic DNA
gtggttatcacgttcgcc

SEQ ID NO: 69158 - DNA, 19 bp, Homo sapiens
  source 1..19: mol_type = genomic DNA
gtggttatcacgttcgcct

SEQ ID NO: 69159 - DNA, 20 bp, Homo sapiens
  source 1..20: mol_type = genomic DNA
gtggttatcacgttcgcctc

SEQ ID NO: 69160 - DNA, 21 bp, Homo sapiens
  source 1..21: mol_type = genomic DNA
gtgtagtggtatcatgcaaga

SEQ ID NO: 69161 - DNA, 24 bp, Homo sapiens
  source 1..24: mol_type = genomic DNA
gtgtttgtgggtttaagtcccatt

SEQ ID NO: 69162 - DNA, 18 bp, Homo sapiens
  source 1..18: mol_type = genomic DNA
gttaaagactttttctct

SEQ ID NO: 69163 - DNA, 17 bp, Homo sapiens
  source 1..17: mol_type = genomic DNA
gttagcactctggactc

SEQ ID NO: 69164 - DNA, 19 bp, Homo sapiens
  source 1..19: mol_type = genomic DNA
gttatcacgtctgctttac

SEQ ID NO: 69165 - DNA, 21 bp, Homo sapiens
  source 1..21: mol_type = genomic DNA
gttcaaatcccggacgagccc

SEQ ID NO: 69166 - DNA, 17 bp, Homo sapiens
  source 1..17: mol_type = genomic DNA
gttcaaatccgggtgcc

SEQ ID NO: 69167 - DNA, 19 bp, Homo sapiens
  source 1..19: mol_type = genomic DNA
gttcaaatccgggtgcccc

SEQ ID NO: 69168 - DNA, 20 bp, Homo sapiens
  source 1..20: mol_type = genomic DNA
gttcaaatccgggtgccccc

SEQ ID NO: 69169 - DNA, 24 bp, Homo sapiens
  source 1..24: mol_type = genomic DNA
gttcaaatccgggtgccccctcca

SEQ ID NO: 69170 - DNA, 20 bp, Homo sapiens
  source 1..20: mol_type = genomic DNA
gttcaaatctcggtggaacc

SEQ ID NO: 69171 - DNA, 20 bp, Homo sapiens
  source 1..20: mol_type = genomic DNA
gttcaagtccctgttcgggc

SEQ ID NO: 69172 - DNA, 18 bp, Homo sapiens
  source 1..18: mol_type = genomic DNA
gttcaggtcgcagtctcc

SEQ ID NO: 69173 - DNA, 17 bp, Homo sapiens
  source 1..17: mol_type = genomic DNA
gttcgaaaccgggcgga

SEQ ID NO: 69174 - DNA, 18 bp, Homo sapiens
  source 1..18: mol_type = genomic DNA
gttcgaaaccgggcggaa

SEQ ID NO: 69175 - DNA, 20 bp, Homo sapiens
  source 1..20: mol_type = genomic DNA
gttcgaaaccgggcggaaac

SEQ ID NO: 69176 - DNA, 21 bp, Homo sapiens
  source 1..21: mol_type = genomic DNA
gttcgaaaccgggcggaaaca

SEQ ID NO: 69177 - DNA, 23 bp, Homo sapiens
  source 1..23: mol_type = genomic DNA
gttcgaaaccgggcggaaacacc

SEQ ID NO: 69178 - DNA, 24 bp, Homo sapiens
  source 1..24: mol_type = genomic DNA
gttcgagtcccggcagagatgcca

SEQ ID NO: 69179 - DNA, 16 bp, Homo sapiens
  source 1..16: mol_type = genomic DNA
gttcgagtcccttcgt

SEQ ID NO: 69180 - DNA, 16 bp, Homo sapiens
  source 1..16: mol_type = genomic DNA
gttctggtctccaatg

SEQ ID NO: 69181 - DNA, 16 bp, Homo sapiens
  source 1..16: mol_type = genomic DNA
gttctggtctccggat

SEQ ID NO: 69182 - DNA, 24 bp, Homo sapiens
  source 1..24: mol_type = genomic DNA
gttgacccgggttcgattcccggc

SEQ ID NO: 69183 - DNA, 21 bp, Homo sapiens
  source 1..21: mol_type = genomic DNA
gttggtggttcgagcccaccc

SEQ ID NO: 69184 - DNA, 18 bp, Homo sapiens
  source 1..18: mol_type = genomic DNA
gttgtggccgcagcaacc

SEQ ID NO: 69185 - DNA, 21 bp, Homo sapiens
  source 1..21: mol_type = genomic DNA
gttgtgggttcgaatcccacc

SEQ ID NO: 69186 - DNA, 21 bp, Homo sapiens
  source 1..21: mol_type = genomic DNA
gttgtgggttcgagtcccacc

SEQ ID NO: 69187 - DNA, 24 bp, Homo sapiens
  source 1..24: mol_type = genomic DNA
gtttaaccaaaacatcagattgtg

SEQ ID NO: 69188 - DNA, 19 bp, Homo sapiens
  source 1..19: mol_type = genomic DNA
gtttccccgcgcaggttcg

SEQ ID NO: 69189 - DNA, 22 bp, Homo sapiens
  source 1..22: mol_type = genomic DNA
taaaactttacagtcagaggtt

SEQ ID NO: 69190 - DNA, 19 bp, Homo sapiens
  source 1..19: mol_type = genomic DNA
taaaccgaagatcacgggt

SEQ ID NO: 69191 - DNA, 21 bp, Homo sapiens
  source 1..21: mol_type = genomic DNA
taaagacaggggttaggcctc

SEQ ID NO: 69192 - DNA, 18 bp, Homo sapiens
  source 1..18: mol_type = genomic DNA
taacccagaggtcgatgg

SEQ ID NO: 69193 - DNA, 20 bp, Homo sapiens
  source 1..20: mol_type = genomic DNA
taaccgaaaggttggtggtt

SEQ ID NO: 69194 - DNA, 20 bp, Homo sapiens
  source 1..20: mol_type = genomic DNA
taacgccaaggtcgcgggtt

SEQ ID NO: 69195 - DNA, 19 bp, Homo sapiens
  source 1..19: mol_type = genomic DNA
taacttagcattaaccttt

SEQ ID NO: 69196 - DNA, 20 bp, Homo sapiens
  source 1..20: mol_type = genomic DNA
taacttagcattaacctttt

SEQ ID NO: 69197 - DNA, 18 bp, Homo sapiens
  source 1..18: mol_type = genomic DNA
taacttccaattaactag

SEQ ID NO: 69198 - DNA, 22 bp, Homo sapiens
  source 1..22: mol_type = genomic DNA
taagctatcgggcccatacccc

SEQ ID NO: 69199 - DNA, 18 bp, Homo sapiens
  source 1..18: mol_type = genomic DNA
taatccagaggttccggg

SEQ ID NO: 69200 - DNA, 18 bp, Homo sapiens
  source 1..18: mol_type = genomic DNA
taatggataaggcattgg

SEQ ID NO: 69201 - DNA, 17 bp, Homo sapiens
  source 1..17: mol_type = genomic DNA
tagagcatcagactttt

SEQ ID NO: 69202 - DNA, 19 bp, Homo sapiens
  source 1..19: mol_type = genomic DNA
tagagcatgagactcttaa

SEQ ID NO: 69203 - DNA, 21 bp, Homo sapiens
  source 1..21: mol_type = genomic DNA
tagagcatgagactcttaatc

SEQ ID NO: 69204 - DNA, 22 bp, Homo sapiens
  source 1..22: mol_type = genomic DNA
tagagcatgagactcttaatct

SEQ ID NO: 69205 - DNA, 21 bp, Homo sapiens
  source 1..21: mol_type = genomic DNA
tagagcatgggactcttaatc

SEQ ID NO: 69206 - DNA, 22 bp, Homo sapiens
  source 1..22: mol_type = genomic DNA
tagagcatgggactcttaatcc

SEQ ID NO: 69207 - DNA, 23 bp, Homo sapiens
  source 1..23: mol_type = genomic DNA
tagagcatgggactcttaatccc

SEQ ID NO: 69208 - DNA, 16 bp, Homo sapiens
  source 1..16: mol_type = genomic DNA
tagagcatttgactgc

SEQ ID NO: 69209 - DNA, 23 bp, Homo sapiens
  source 1..23: mol_type = genomic DNA
tagcactctggactctgaatcca

SEQ ID NO: 69210 - DNA, 21 bp, Homo sapiens
  source 1..21: mol_type = genomic DNA
tagcggttaggattcctggtt

SEQ ID NO: 69211 - DNA, 17 bp, Homo sapiens
  source 1..17: mol_type = genomic DNA
tagctcagtcggtagag

SEQ ID NO: 69212 - DNA, 19 bp, Homo sapiens
  source 1..19: mol_type = genomic DNA
taggattcggcgctctcac

SEQ ID NO: 69213 - DNA, 17 bp, Homo sapiens
  source 1..17: mol_type = genomic DNA
taggttcgactcctggc

SEQ ID NO: 69214 - DNA, 18 bp, Homo sapiens
  source 1..18: mol_type = genomic DNA
tagtggtatcatgcaaga

SEQ ID NO: 69215 - DNA, 20 bp, Homo sapiens
  source 1..20: mol_type = genomic DNA
tagtggttagtactctgcgt

SEQ ID NO: 69216 - DNA, 23 bp, Homo sapiens
  source 1..23: mol_type = genomic DNA
tatccattggtcttaggccccaa

SEQ ID NO: 69217 - DNA, 25 bp, Homo sapiens
  source 1..25: mol_type = genomic DNA
tatgattctcgcttcgggtgcgaga

SEQ ID NO: 69218 - DNA, 17 bp, Homo sapiens
  source 1..17: mol_type = genomic DNA
tatgattctcgctttgg

SEQ ID NO: 69219 - DNA, 25 bp, Homo sapiens
  source 1..25: mol_type = genomic DNA
tatgattctcgctttgggtgcgaga

SEQ ID NO: 69220 - DNA, 25 bp, Homo sapiens
  source 1..25: mol_type = genomic DNA
tatgattctcggtttgggtccgaga

SEQ ID NO: 69221 - DNA, 18 bp, Homo sapiens
  source 1..18: mol_type = genomic DNA
tcaacttaacttgaccgc

SEQ ID NO: 69222 - DNA, 16 bp, Homo sapiens
  source 1..16: mol_type = genomic DNA
tcaagttctggtctcc

SEQ ID NO: 69223 - DNA, 19 bp, Homo sapiens
  source 1..19: mol_type = genomic DNA
tcacacgcgaaaggtcccc

SEQ ID NO: 69224 - DNA, 20 bp, Homo sapiens
  source 1..20: mol_type = genomic DNA
tcacgcgggagaccggggtt

SEQ ID NO: 69225 - DNA, 18 bp, Homo sapiens
  source 1..18: mol_type = genomic DNA
tcagaagattccaggttc

SEQ ID NO: 69226 - DNA, 18 bp, Homo sapiens
  source 1..18: mol_type = genomic DNA
tcagaagattgagggttc

SEQ ID NO: 69227 - DNA, 17 bp, Homo sapiens
  source 1..17: mol_type = genomic DNA
tcagattgtgaatctga

SEQ ID NO: 69228 - DNA, 20 bp, Homo sapiens
  source 1..20: mol_type = genomic DNA
tcagcctccggagctgggga

SEQ ID NO: 69229 - DNA, 20 bp, Homo sapiens
  source 1..20: mol_type = genomic DNA
tcagctaaataagctatcgg

SEQ ID NO: 69230 - DNA, 17 bp, Homo sapiens
  source 1..17: mol_type = genomic DNA
tcaggtcgcagtctccc

SEQ ID NO: 69231 - DNA, 25 bp, Homo sapiens
  source 1..25: mol_type = genomic DNA
tcagtcggtagagcatcagactttt

SEQ ID NO: 69232 - DNA, 19 bp, Homo sapiens
  source 1..19: mol_type = genomic DNA
tcagtcggtagagcatggg

SEQ ID NO: 69233 - DNA, 23 bp, Homo sapiens
  source 1..23: mol_type = genomic DNA
tcagtggtagagcatttgactgc

SEQ ID NO: 69234 - DNA, 19 bp, Homo sapiens
  source 1..19: mol_type = genomic DNA
tcatgcccccatgtctaac

SEQ ID NO: 69235 - DNA, 19 bp, Homo sapiens
  source 1..19: mol_type = genomic DNA
tccagaggttccgggttcg

SEQ ID NO: 69236 - DNA, 18 bp, Homo sapiens
  source 1..18: mol_type = genomic DNA
tccagatcagaaggctgc

SEQ ID NO: 69237 - DNA, 18 bp, Homo sapiens
  source 1..18: mol_type = genomic DNA
tccagatcagaaggttgc

SEQ ID NO: 69238 - DNA, 21 bp, Homo sapiens
  source 1..21: mol_type = genomic DNA
tccattggtcttaggccccaa

SEQ ID NO: 69239 - DNA, 21 bp, Homo sapiens
  source 1..21: mol_type = genomic DNA
tcccacatggtctagcggtta

SEQ ID NO: 69240 - DNA, 20 bp, Homo sapiens
  source 1..20: mol_type = genomic DNA
tccccggttcgaaaccgggc

SEQ ID NO: 69241 - DNA, 17 bp, Homo sapiens
  source 1..17: mol_type = genomic DNA
tcccggcagagatgcca

SEQ ID NO: 69242 - DNA, 22 bp, Homo sapiens
  source 1..22: mol_type = genomic DNA
tccctgtggtctagtggttagg

SEQ ID NO: 69243 - DNA, 22 bp, Homo sapiens
  source 1..22: mol_type = genomic DNA
tccgtagtgtagtggttatcac

SEQ ID NO: 69244 - DNA, 20 bp, Homo sapiens
  source 1..20: mol_type = genomic DNA
tcctaagccagggattgtgg

SEQ ID NO: 69245 - DNA, 17 bp, Homo sapiens
  source 1..17: mol_type = genomic DNA
tcctcttcttaacacca

SEQ ID NO: 69246 - DNA, 20 bp, Homo sapiens
  source 1..20: mol_type = genomic DNA
tcctgggttcgaatcccagc

SEQ ID NO: 69247 - DNA, 19 bp, Homo sapiens
  source 1..19: mol_type = genomic DNA
tccttaggtcgctggttcg

SEQ ID NO: 69248 - DNA, 16 bp, Homo sapiens
  source 1..16: mol_type = genomic DNA
tcgaaaccgggcggaa

SEQ ID NO: 69249 - DNA, 18 bp, Homo sapiens
  source 1..18: mol_type = genomic DNA
tcgaaaccgggcggaaac

SEQ ID NO: 69250 - DNA, 19 bp, Homo sapiens
  source 1..19: mol_type = genomic DNA
tcgaaaccgggcggaaaca

SEQ ID NO: 69251 - DNA, 22 bp, Homo sapiens
  source 1..22: mol_type = genomic DNA
tcgaaccccgtccgtgcctcca

SEQ ID NO: 69252 - DNA, 19 bp, Homo sapiens
  source 1..19: mol_type = genomic DNA
tcgagcctcacctggagca

SEQ ID NO: 69253 - DNA, 20 bp, Homo sapiens
  source 1..20: mol_type = genomic DNA
tcgcataaaacttaaaactt

SEQ ID NO: 69254 - DNA, 17 bp, Homo sapiens
  source 1..17: mol_type = genomic DNA
tcgctttgggtgcgaga

SEQ ID NO: 69255 - DNA, 17 bp, Homo sapiens
  source 1..17: mol_type = genomic DNA
tcggctgttaaccgaaa

SEQ ID NO: 69256 - DNA, 18 bp, Homo sapiens
  source 1..18: mol_type = genomic DNA
tcgtaaaccgaagatcgc

SEQ ID NO: 69257 - DNA, 20 bp, Homo sapiens
  source 1..20: mol_type = genomic DNA
tcgtatagtggttagtactc

SEQ ID NO: 69258 - DNA, 16 bp, Homo sapiens
  source 1..16: mol_type = genomic DNA
tcgttagcgcagtagg

SEQ ID NO: 69259 - DNA, 20 bp, Homo sapiens
  source 1..20: mol_type = genomic DNA
tctaacaacatggctttctc

SEQ ID NO: 69260 - DNA, 23 bp, Homo sapiens
  source 1..23: mol_type = genomic DNA
tctagcggttaggattcctggtt

SEQ ID NO: 69261 - DNA, 23 bp, Homo sapiens
  source 1..23: mol_type = genomic DNA
tctagtggttaggattcggcgct

SEQ ID NO: 69262 - DNA, 17 bp, Homo sapiens
  source 1..17: mol_type = genomic DNA
tctgaaggtcctgagtt

SEQ ID NO: 69263 - DNA, 23 bp, Homo sapiens
  source 1..23: mol_type = genomic DNA
tctgaatccagcgatccgagttc

SEQ ID NO: 69264 - DNA, 17 bp, Homo sapiens
  source 1..17: mol_type = genomic DNA
tctgacttcggatcaga

SEQ ID NO: 69265 - DNA, 19 bp, Homo sapiens
  source 1..19: mol_type = genomic DNA
tctgcgttgtggccgcagc

SEQ ID NO: 69266 - DNA, 21 bp, Homo sapiens
  source 1..21: mol_type = genomic DNA
tctggactctgaatccagcga

SEQ ID NO: 69267 - DNA, 19 bp, Homo sapiens
  source 1..19: mol_type = genomic DNA
tctggactttgaatccagc

SEQ ID NO: 69268 - DNA, 20 bp, Homo sapiens
  source 1..20: mol_type = genomic DNA
tctggactttgaatccagcg

SEQ ID NO: 69269 - DNA, 21 bp, Homo sapiens
  source 1..21: mol_type = genomic DNA
tctggactttgaatccagcga

SEQ ID NO: 69270 - DNA, 18 bp, Homo sapiens
  source 1..18: mol_type = genomic DNA
tcttaatctcagggtcgt

SEQ ID NO: 69271 - DNA, 18 bp, Homo sapiens
  source 1..18: mol_type = genomic DNA
tcttgcgacccgggttcg

SEQ ID NO: 69272 - DNA, 16 bp, Homo sapiens
  source 1..16: mol_type = genomic DNA
tgaaggtcctgagttc

SEQ ID NO: 69273 - DNA, 17 bp, Homo sapiens
  source 1..17: mol_type = genomic DNA
tgaaggtcctgagttcg

SEQ ID NO: 69274 - DNA, 18 bp, Homo sapiens
  source 1..18: mol_type = genomic DNA
tgacaacagaggcttacg

SEQ ID NO: 69275 - DNA, 16 bp, Homo sapiens
  source 1..16: mol_type = genomic DNA
tgactccagatcagaa

SEQ ID NO: 69276 - DNA, 19 bp, Homo sapiens
  source 1..19: mol_type = genomic DNA
tgactccagatcagaaggc

SEQ ID NO: 69277 - DNA, 20 bp, Homo sapiens
  source 1..20: mol_type = genomic DNA
tgactccagatcagaaggct

SEQ ID NO: 69278 - DNA, 22 bp, Homo sapiens
  source 1..22: mol_type = genomic DNA
tgactccagatcagaaggttgc

SEQ ID NO: 69279 - DNA, 21 bp, Homo sapiens
  source 1..21: mol_type = genomic DNA
tgactgcagatcaagaggtcc

SEQ ID NO: 69280 - DNA, 22 bp, Homo sapiens
  source 1..22: mol_type = genomic DNA
tgactgcagatcaagaggtccc

SEQ ID NO: 69281 - DNA, 16 bp, Homo sapiens
  source 1..16: mol_type = genomic DNA
tgacttcggatcagaa

SEQ ID NO: 69282 - DNA, 21 bp, Homo sapiens
  source 1..21: mol_type = genomic DNA
tgacttcggatcagaagattg

SEQ ID NO: 69283 - DNA, 16 bp, Homo sapiens
  source 1..16: mol_type = genomic DNA
tgagactcttaatctc

SEQ ID NO: 69284 - DNA, 17 bp, Homo sapiens
  source 1..17: mol_type = genomic DNA
tgagggtccagggttca

SEQ ID NO: 69285 - DNA, 19 bp, Homo sapiens
  source 1..19: mol_type = genomic DNA
tgagggttcgagtcccttc

SEQ ID NO: 69286 - DNA, 17 bp, Homo sapiens
  source 1..17: mol_type = genomic DNA
tgagttcgatcctcaca

SEQ ID NO: 69287 - DNA, 16 bp, Homo sapiens
  source 1..16: mol_type = genomic DNA
tgattccggatcagaa

SEQ ID NO: 69288 - DNA, 22 bp, Homo sapiens
  source 1..22: mol_type = genomic DNA
tgattccggatcagaagattga

SEQ ID NO: 69289 - DNA, 23 bp, Homo sapiens
  source 1..23: mol_type = genomic DNA
tgattctcgcttcgggtgcgaga

SEQ ID NO: 69290 - DNA, 23 bp, Homo sapiens
  source 1..23: mol_type = genomic DNA
tgattctcgctttgggtgcgaga

SEQ ID NO: 69291 - DNA, 22 bp, Homo sapiens
  source 1..22: mol_type = genomic DNA
tgattctcggtttgggtccgag

SEQ ID NO: 69292 - DNA, 18 bp, Homo sapiens
  source 1..18: mol_type = genomic DNA
tgccgaggttgtgagttc

SEQ ID NO: 69293 - DNA, 25 bp, Homo sapiens
  source 1..25: mol_type = genomic DNA
tgcgacccgggttcgattcccgggc

SEQ ID NO: 69294 - DNA, 18 bp, Homo sapiens
  source 1..18: mol_type = genomic DNA
tgctaatccattgtgctt

SEQ ID NO: 69295 - DNA, 22 bp, Homo sapiens
  source 1..22: mol_type = genomic DNA
tgctaatggtggagttaaagac

SEQ ID NO: 69296 - DNA, 19 bp, Homo sapiens
  source 1..19: mol_type = genomic DNA
tgctgggcccataacccag

SEQ ID NO: 69297 - DNA, 18 bp, Homo sapiens
  source 1..18: mol_type = genomic DNA
tggactctgaatccagcg

SEQ ID NO: 69298 - DNA, 18 bp, Homo sapiens
  source 1..18: mol_type = genomic DNA
tggactttgaatccagcg

SEQ ID NO: 69299 - DNA, 19 bp, Homo sapiens
  source 1..19: mol_type = genomic DNA
tggactttgaatccagcga

SEQ ID NO: 69300 - DNA, 20 bp, Homo sapiens
  source 1..20: mol_type = genomic DNA
tggataaggcatcagcctcc

SEQ ID NO: 69301 - DNA, 20 bp, Homo sapiens
  source 1..20: mol_type = genomic DNA
tggataaggcgtctgattcc

SEQ ID NO: 69302 - DNA, 18 bp, Homo sapiens
  source 1..18: mol_type = genomic DNA
tggatcgaaaccatcctc

SEQ ID NO: 69303 - DNA, 19 bp, Homo sapiens
  source 1..19: mol_type = genomic DNA
tggatcgaaaccatcctct

SEQ ID NO: 69304 - DNA, 18 bp, Homo sapiens
  source 1..18: mol_type = genomic DNA
tggatttaggctccagtc

SEQ ID NO: 69305 - DNA, 19 bp, Homo sapiens
  source 1..19: mol_type = genomic DNA
tggccgagcggtctaaggc

SEQ ID NO: 69306 - DNA, 17 bp, Homo sapiens
  source 1..17: mol_type = genomic DNA
tggccgagtggttaagg

SEQ ID NO: 69307 - DNA, 18 bp, Homo sapiens
  source 1..18: mol_type = genomic DNA
tggccgagtggttaaggc

SEQ ID NO: 69308 - DNA, 20 bp, Homo sapiens
  source 1..20: mol_type = genomic DNA
tggccgcagcaacctcggtt

SEQ ID NO: 69309 - DNA, 22 bp, Homo sapiens
  source 1..22: mol_type = genomic DNA
tggcgtgggttcgaatcccacc

SEQ ID NO: 69310 - DNA, 16 bp, Homo sapiens
  source 1..16: mol_type = genomic DNA
tgggactcttaatccc

SEQ ID NO: 69311 - DNA, 16 bp, Homo sapiens
  source 1..16: mol_type = genomic DNA
tgggcccataacccag

SEQ ID NO: 69312 - DNA, 17 bp, Homo sapiens
  source 1..17: mol_type = genomic DNA
tgggtgcgagaggtccc

SEQ ID NO: 69313 - DNA, 17 bp, Homo sapiens
  source 1..17: mol_type = genomic DNA
tgggttcgaatcccacc

SEQ ID NO: 69314 - DNA, 18 bp, Homo sapiens
  source 1..18: mol_type = genomic DNA
tgggttcgaatcccatcc

SEQ ID NO: 69315 - DNA, 18 bp, Homo sapiens
  source 1..18: mol_type = genomic DNA
tgggttcgagccccacgt

SEQ ID NO: 69316 - DNA, 20 bp, Homo sapiens
  source 1..20: mol_type = genomic DNA
tggtagagcatttgactgca

SEQ ID NO: 69317 - DNA, 20 bp, Homo sapiens
  source 1..20: mol_type = genomic DNA
tggtagagcgcatgctttgc

SEQ ID NO: 69318 - DNA, 16 bp, Homo sapiens
  source 1..16: mol_type = genomic DNA
tggtatagtggtaagc

SEQ ID NO: 69319 - DNA, 16 bp, Homo sapiens
  source 1..16: mol_type = genomic DNA
tggtcatcacgttcgc

SEQ ID NO: 69320 - DNA, 17 bp, Homo sapiens
  source 1..17: mol_type = genomic DNA
tggtcatcacgttcgcc

SEQ ID NO: 69321 - DNA, 16 bp, Homo sapiens
  source 1..16: mol_type = genomic DNA
tggtctagcggttagg

SEQ ID NO: 69322 - DNA, 19 bp, Homo sapiens
  source 1..19: mol_type = genomic DNA
tggtgcaactccaaataaa

SEQ ID NO: 69323 - DNA, 24 bp, Homo sapiens
  source 1..24: mol_type = genomic DNA
tggtggagttaaagactttttctc

SEQ ID NO: 69324 - DNA, 18 bp, Homo sapiens
  source 1..18: mol_type = genomic DNA
tggtggtctagtggttag

SEQ ID NO: 69325 - DNA, 20 bp, Homo sapiens
  source 1..20: mol_type = genomic DNA
tggtggttcagtggtagaat

SEQ ID NO: 69326 - DNA, 21 bp, Homo sapiens
  source 1..21: mol_type = genomic DNA
tggttatcacgtctgctttac

SEQ ID NO: 69327 - DNA, 18 bp, Homo sapiens
  source 1..18: mol_type = genomic DNA
tggttatcacgttcgcct

SEQ ID NO: 69328 - DNA, 19 bp, Homo sapiens
  source 1..19: mol_type = genomic DNA
tggttatcacgttcgcctc

SEQ ID NO: 69329 - DNA, 20 bp, Homo sapiens
  source 1..20: mol_type = genomic DNA
tggttatcacgttcgcctca

SEQ ID NO: 69330 - DNA, 21 bp, Homo sapiens
  source 1..21: mol_type = genomic DNA
tggttatcacgttcgcctcac

SEQ ID NO: 69331 - DNA, 19 bp, Homo sapiens
  source 1..19: mol_type = genomic DNA
tggttcaaatccgggtgcc

SEQ ID NO: 69332 - DNA, 18 bp, Homo sapiens
  source 1..18: mol_type = genomic DNA
tggttcagtggtagaatt

SEQ ID NO: 69333 - DNA, 16 bp, Homo sapiens
  source 1..16: mol_type = genomic DNA
tggttcgagcccaccc

SEQ ID NO: 69334 - DNA, 17 bp, Homo sapiens
  source 1..17: mol_type = genomic DNA
tggttttcacccaggtg

SEQ ID NO: 69335 - DNA, 23 bp, Homo sapiens
  source 1..23: mol_type = genomic DNA
tgtagcggttatcacattcgcct

SEQ ID NO: 69336 - DNA, 23 bp, Homo sapiens
  source 1..23: mol_type = genomic DNA
tgtagtggttatcacgttcgcct

SEQ ID NO: 69337 - DNA, 18 bp, Homo sapiens
  source 1..18: mol_type = genomic DNA
tgtctaacaacatggctt

SEQ ID NO: 69338 - DNA, 20 bp, Homo sapiens
  source 1..20: mol_type = genomic DNA
tgtctaacaacatggctttc

SEQ ID NO: 69339 - DNA, 21 bp, Homo sapiens
  source 1..21: mol_type = genomic DNA
tgtctaacaacatggctttct

SEQ ID NO: 69340 - DNA, 19 bp, Homo sapiens
  source 1..19: mol_type = genomic DNA
tgtgagttcgagcctcacc

SEQ ID NO: 69341 - DNA, 22 bp, Homo sapiens
  source 1..22: mol_type = genomic DNA
ttaaccaaaacatcagattgtg

SEQ ID NO: 69342 - DNA, 21 bp, Homo sapiens
  source 1..21: mol_type = genomic DNA
ttaaccgaaaggttggtggtt

SEQ ID NO: 69343 - DNA, 19 bp, Homo sapiens
  source 1..19: mol_type = genomic DNA
ttaacttccaattaactag

SEQ ID NO: 69344 - DNA, 22 bp, Homo sapiens
  source 1..22: mol_type = genomic DNA
ttaagttaaagattaagagaac

SEQ ID NO: 69345 - DNA, 16 bp, Homo sapiens
  source 1..16: mol_type = genomic DNA
ttaatcccagggtcgt

SEQ ID NO: 69346 - DNA, 20 bp, Homo sapiens
  source 1..20: mol_type = genomic DNA
ttagaatcttagctttgggt

SEQ ID NO: 69347 - DNA, 18 bp, Homo sapiens
  source 1..18: mol_type = genomic DNA
ttagggtgcttagctgtt

SEQ ID NO: 69348 - DNA, 18 bp, Homo sapiens
  source 1..18: mol_type = genomic DNA
ttatcacgttcgcctcac

SEQ ID NO: 69349 - DNA, 20 bp, Homo sapiens
  source 1..20: mol_type = genomic DNA
ttcaaatcccggacgagccc

SEQ ID NO: 69350 - DNA, 18 bp, Homo sapiens
  source 1..18: mol_type = genomic DNA
ttcaaatctcggtggaac

SEQ ID NO: 69351 - DNA, 22 bp, Homo sapiens
  source 1..22: mol_type = genomic DNA
ttcagtggtagaattctcgcct

SEQ ID NO: 69352 - DNA, 22 bp, Homo sapiens
  source 1..22: mol_type = genomic DNA
ttcatatcattggtcgtggttg

SEQ ID NO: 69353 - DNA, 20 bp, Homo sapiens
  source 1..20: mol_type = genomic DNA
ttccgtagtgtagtggttat

SEQ ID NO: 69354 - DNA, 16 bp, Homo sapiens
  source 1..16: mol_type = genomic DNA
ttcgaaaccgggcgga

SEQ ID NO: 69355 - DNA, 19 bp, Homo sapiens
  source 1..19: mol_type = genomic DNA
ttcgaaaccgggcggaaac

SEQ ID NO: 69356 - DNA, 20 bp, Homo sapiens
  source 1..20: mol_type = genomic DNA
ttcgaaaccgggcggaaaca

SEQ ID NO: 69357 - DNA, 22 bp, Homo sapiens
  source 1..22: mol_type = genomic DNA
ttcgagcccacccagggacgcc

SEQ ID NO: 69358 - DNA, 19 bp, Homo sapiens
  source 1..19: mol_type = genomic DNA
ttcgagcctcacctggagc

SEQ ID NO: 69359 - DNA, 20 bp, Homo sapiens
  source 1..20: mol_type = genomic DNA
ttcgagcctcacctggagca

SEQ ID NO: 69360 - DNA, 22 bp, Homo sapiens
  source 1..22: mol_type = genomic DNA
ttcgagcctcacctggagcacc

SEQ ID NO: 69361 - DNA, 17 bp, Homo sapiens
  source 1..17: mol_type = genomic DNA
ttcggatcagaagattg

SEQ ID NO: 69362 - DNA, 18 bp, Homo sapiens
  source 1..18: mol_type = genomic DNA
ttcggatcagaagattga

SEQ ID NO: 69363 - DNA, 20 bp, Homo sapiens
  source 1..20: mol_type = genomic DNA
ttctaggttcgactcctggc

SEQ ID NO: 69364 - DNA, 21 bp, Homo sapiens
  source 1..21: mol_type = genomic DNA
ttgaatccagcgatccgagtt

SEQ ID NO: 69365 - DNA, 17 bp, Homo sapiens
  source 1..17: mol_type = genomic DNA
ttgactgcagatcaaga

SEQ ID NO: 69366 - DNA, 17 bp, Homo sapiens
  source 1..17: mol_type = genomic DNA
ttgagggttcgaatccc

SEQ ID NO: 69367 - DNA, 20 bp, Homo sapiens
  source 1..20: mol_type = genomic DNA
ttgagggttcgaatcccttc

SEQ ID NO: 69368 - DNA, 20 bp, Homo sapiens
  source 1..20: mol_type = genomic DNA
ttgcaggttcgagtcctgcc

SEQ ID NO: 69369 - DNA, 16 bp, Homo sapiens
  source 1..16: mol_type = genomic DNA
ttgcgacccgggttcg

SEQ ID NO: 69370 - DNA, 16 bp, Homo sapiens
  source 1..16: mol_type = genomic DNA
ttggtggtatagtggt

SEQ ID NO: 69371 - DNA, 20 bp, Homo sapiens
  source 1..20: mol_type = genomic DNA
ttggtggttcgagcccaccc

SEQ ID NO: 69372 - DNA, 17 bp, Homo sapiens
  source 1..17: mol_type = genomic DNA
ttgtaaaccggagatga

SEQ ID NO: 69373 - DNA, 20 bp, Homo sapiens
  source 1..20: mol_type = genomic DNA
ttgtgagttcgagcctcacc

SEQ ID NO: 69374 - DNA, 20 bp, Homo sapiens
  source 1..20: mol_type = genomic DNA
ttgtgggttcgaatcccacc

SEQ ID NO: 69375 - DNA, 23 bp, Homo sapiens
  source 1..23: mol_type = genomic DNA
tttaaccaaaacatcagattgtg

SEQ ID NO: 69376 - DNA, 19 bp, Homo sapiens
  source 1..19: mol_type = genomic DNA
tttacacgcagaaggtcct

SEQ ID NO: 69377 - DNA, 22 bp, Homo sapiens
  source 1..22: mol_type = genomic DNA
tttagacgggctcacatcaccc

SEQ ID NO: 69378 - DNA, 19 bp, Homo sapiens
  source 1..19: mol_type = genomic DNA
tttaggctccagtcatttc

SEQ ID NO: 69379 - DNA, 18 bp, Homo sapiens
  source 1..18: mol_type = genomic DNA
tttgcgttcagttgatgc

SEQ ID NO: 69380 - DNA, 21 bp, Homo sapiens
  source 1..21: mol_type = genomic DNA
tttggggggttcgattccttc

SEQ ID NO: 69381 - DNA, 18 bp, Homo sapiens
  source 1..18: mol_type = genomic DNA
ttttcacccaggcggccc

SEQ ID NO: 69382 - DNA, 23 bp, Homo sapiens
  source 1..23: mol_type = genomic DNA
aaacaaaacgaatgatttcgact

SEQ ID NO: 69383 - DNA, 25 bp, Homo sapiens
  source 1..25: mol_type = genomic DNA
aaataagctatcgggcccatacccc

SEQ ID NO: 69384 - DNA, 21 bp, Homo sapiens
  source 1..21: mol_type = genomic DNA
aaattataggctaaatcctat

SEQ ID NO: 69385 - DNA, 22 bp, Homo sapiens
  source 1..22: mol_type = genomic DNA
aacaaaacgaatgatttcgact

SEQ ID NO: 69386 - DNA, 18 bp, Homo sapiens
  source 1..18: mol_type = genomic DNA
aaccagctttggggggtt

SEQ ID NO: 69387 - DNA, 19 bp, Homo sapiens
  source 1..19: mol_type = genomic DNA
aacccagaggtcgatggat

SEQ ID NO: 69388 - DNA, 19 bp, Homo sapiens
  source 1..19: mol_type = genomic DNA
aaccgaaaggttggtggtt

SEQ ID NO: 69389 - DNA, 18 bp, Homo sapiens
  source 1..18: mol_type = genomic DNA
aactcatgcccccatgtc

SEQ ID NO: 69390 - DNA, 20 bp, Homo sapiens
  source 1..20: mol_type = genomic DNA
aactcatgcccccatgtcta

SEQ ID NO: 69391 - DNA, 21 bp, Homo sapiens
  source 1..21: mol_type = genomic DNA
aagctatcgggcccatacccc

SEQ ID NO: 69392 - DNA, 22 bp, Homo sapiens
  source 1..22: mol_type = genomic DNA
aagggcttagcttaattaaagt

SEQ ID NO: 69393 - DNA, 23 bp, Homo sapiens
  source 1..23: mol_type = genomic DNA
aagggcttagcttaattaaagtg

SEQ ID NO: 69394 - DNA, 25 bp, Homo sapiens
  source 1..25: mol_type = genomic DNA
aatggtggagttaaagactttttct

SEQ ID NO: 69395 - DNA, 21 bp, Homo sapiens
  source 1..21: mol_type = genomic DNA
aattataggctaaatcctata

SEQ ID NO: 69396 - DNA, 21 bp, Homo sapiens
  source 1..21: mol_type = genomic DNA
acaaaacgaatgatttcgact

SEQ ID NO: 69397 - DNA, 22 bp, Homo sapiens
  source 1..22: mol_type = genomic DNA
acaaagcacccaacttacactt

SEQ ID NO: 69398 - DNA, 25 bp, Homo sapiens
  source 1..25: mol_type = genomic DNA
acaaagcacccaacttacacttagg

SEQ ID NO: 69399 - DNA, 21 bp, Homo sapiens
  source 1..21: mol_type = genomic DNA
acaacgatggtttttcatatc

SEQ ID NO: 69400 - DNA, 25 bp, Homo sapiens
  source 1..25: mol_type = genomic DNA
acagtcagaggttcaattcctcttc

SEQ ID NO: 69401 - DNA, 19 bp, Homo sapiens
  source 1..19: mol_type = genomic DNA
acatatgtccgcgtgggtt

SEQ ID NO: 69402 - DNA, 18 bp, Homo sapiens
  source 1..18: mol_type = genomic DNA
accgaaaggttggtggtt

SEQ ID NO: 69403 - DNA, 21 bp, Homo sapiens
  source 1..21: mol_type = genomic DNA
actgaaaatgtttagacgggc

SEQ ID NO: 69404 - DNA, 23 bp, Homo sapiens
  source 1..23: mol_type = genomic DNA
agaaatttaggttaaatacagac

SEQ ID NO: 69405 - DNA, 18 bp, Homo sapiens
  source 1..18: mol_type = genomic DNA
agaaccaacacctcttta

SEQ ID NO: 69406 - DNA, 19 bp, Homo sapiens
  source 1..19: mol_type = genomic DNA
agagaaccaacacctcttt

SEQ ID NO: 69407 - DNA, 19 bp, Homo sapiens
  source 1..19: mol_type = genomic DNA
aggcatcagcctccggagc

SEQ ID NO: 69408 - DNA, 19 bp, Homo sapiens
  source 1..19: mol_type = genomic DNA
aggtggccgagtggttaag

SEQ ID NO: 69409 - DNA, 21 bp, Homo sapiens
  source 1..21: mol_type = genomic DNA
agtcgatagagcatgagactc

SEQ ID NO: 69410 - DNA, 21 bp, Homo sapiens
  source 1..21: mol_type = genomic DNA
agtctcttcgggggcgtgggt

SEQ ID NO: 69411 - DNA, 18 bp, Homo sapiens
  source 1..18: mol_type = genomic DNA
agttaaagactttttctc

SEQ ID NO: 69412 - DNA, 25 bp, Homo sapiens
  source 1..25: mol_type = genomic DNA
agttctggtctccggatggaggcgt

SEQ ID NO: 69413 - DNA, 19 bp, Homo sapiens
  source 1..19: mol_type = genomic DNA
atacaacgatggtttttca

SEQ ID NO: 69414 - DNA, 18 bp, Homo sapiens
  source 1..18: mol_type = genomic DNA
atattgaattgcaaattc

SEQ ID NO: 69415 - DNA, 19 bp, Homo sapiens
  source 1..19: mol_type = genomic DNA
atcggttagcgcgcggtac

SEQ ID NO: 69416 - DNA, 16 bp, Homo sapiens
  source 1..16: mol_type = genomic DNA
attgagggttcgagtc

SEQ ID NO: 69417 - DNA, 23 bp, Homo sapiens
  source 1..23: mol_type = genomic DNA
atttcataactttgtcaaagtta

SEQ ID NO: 69418 - DNA, 23 bp, Homo sapiens
  source 1..23: mol_type = genomic DNA
caaaacatcagattgtgaatctg

SEQ ID NO: 69419 - DNA, 22 bp, Homo sapiens
  source 1..22: mol_type = genomic DNA
caaagcacccaacttacactta

SEQ ID NO: 69420 - DNA, 18 bp, Homo sapiens
  source 1..18: mol_type = genomic DNA
caattaactagttttgac

SEQ ID NO: 69421 - DNA, 25 bp, Homo sapiens
  source 1..25: mol_type = genomic DNA
caattaactagttttgacaacattc

SEQ ID NO: 69422 - DNA, 21 bp, Homo sapiens
  source 1..21: mol_type = genomic DNA
cactctggactctgaatccag

SEQ ID NO: 69423 - DNA, 18 bp, Homo sapiens
  source 1..18: mol_type = genomic DNA
cagaccaagagccttcaa

SEQ ID NO: 69424 - DNA, 20 bp, Homo sapiens
  source 1..20: mol_type = genomic DNA
cagctaaataagctatcggg

SEQ ID NO: 69425 - DNA, 22 bp, Homo sapiens
  source 1..22: mol_type = genomic DNA
cataacccagaggtcgatggat

SEQ ID NO: 69426 - DNA, 19 bp, Homo sapiens
  source 1..19: mol_type = genomic DNA
catattgaattgcaaattc

SEQ ID NO: 69427 - DNA, 19 bp, Homo sapiens
  source 1..19: mol_type = genomic DNA
ccaacacctctttacagtg

SEQ ID NO: 69428 - DNA, 18 bp, Homo sapiens
  source 1..18: mol_type = genomic DNA
cccaacttacacttagga

SEQ ID NO: 69429 - DNA, 21 bp, Homo sapiens
  source 1..21: mol_type = genomic DNA
cccataacccagaggtcgatg

SEQ ID NO: 69430 - DNA, 20 bp, Homo sapiens
  source 1..20: mol_type = genomic DNA
cccgaaaatgttggttatac

SEQ ID NO: 69431 - DNA, 21 bp, Homo sapiens
  source 1..21: mol_type = genomic DNA
cccgaaaatgttggttatacc

SEQ ID NO: 69432 - DNA, 20 bp, Homo sapiens
  source 1..20: mol_type = genomic DNA
ccggctagctcagtcggtag

SEQ ID NO: 69433 - DNA, 18 bp, Homo sapiens
  source 1..18: mol_type = genomic DNA
cctgggtagctcagtcgg

SEQ ID NO: 69434 - DNA, 22 bp, Homo sapiens
  source 1..22: mol_type = genomic DNA
cgaaaatgttggttataccctt

SEQ ID NO: 69435 - DNA, 21 bp, Homo sapiens
  source 1..21: mol_type = genomic DNA
cgactcctggctggctcgcca

SEQ ID NO: 69436 - DNA, 20 bp, Homo sapiens
  source 1..20: mol_type = genomic DNA
cgggctcacatcaccccata

SEQ ID NO: 69437 - DNA, 21 bp, Homo sapiens
  source 1..21: mol_type = genomic DNA
cggtaatcgcataaaacttaa

SEQ ID NO: 69438 - DNA, 17 bp, Homo sapiens
  source 1..17: mol_type = genomic DNA
cggttagcgcgcggtac

SEQ ID NO: 69439 - DNA, 24 bp, Homo sapiens
  source 1..24: mol_type = genomic DNA
cgtgatcgtatagtggttagtact

SEQ ID NO: 69440 - DNA, 21 bp, Homo sapiens
  source 1..21: mol_type = genomic DNA
ctaagccagggattgtgggtt

SEQ ID NO: 69441 - DNA, 20 bp, Homo sapiens
  source 1..20: mol_type = genomic DNA
ctatccattggtcttaggcc

SEQ ID NO: 69442 - DNA, 22 bp, Homo sapiens
  source 1..22: mol_type = genomic DNA
ctcacaagaactgctaactcat

SEQ ID NO: 69443 - DNA, 19 bp, Homo sapiens
  source 1..19: mol_type = genomic DNA
ctcatgcccccatgtctaa

SEQ ID NO: 69444 - DNA, 19 bp, Homo sapiens
  source 1..19: mol_type = genomic DNA
ctctgtggcgcaatggacg

SEQ ID NO: 69445 - DNA, 21 bp, Homo sapiens
  source 1..21: mol_type = genomic DNA
ctcttaatcccagggtcgtgg

SEQ ID NO: 69446 - DNA, 24 bp, Homo sapiens
  source 1..24: mol_type = genomic DNA
ctgacaacagaggcttacgacccc

SEQ ID NO: 69447 - DNA, 20 bp, Homo sapiens
  source 1..20: mol_type = genomic DNA
cttaagatccaatggacata

SEQ ID NO: 69448 - DNA, 23 bp, Homo sapiens
  source 1..23: mol_type = genomic DNA
cttacacttaggagatttcaact

SEQ ID NO: 69449 - DNA, 20 bp, Homo sapiens
  source 1..20: mol_type = genomic DNA
cttacgaccccttatttacc

SEQ ID NO: 69450 - DNA, 23 bp, Homo sapiens
  source 1..23: mol_type = genomic DNA
gactcaagttctggtctccggat

SEQ ID NO: 69451 - DNA, 19 bp, Homo sapiens
  source 1..19: mol_type = genomic DNA
gagaaccaacacctcttta

SEQ ID NO: 69452 - DNA, 19 bp, Homo sapiens
  source 1..19: mol_type = genomic DNA
gcccggctagctcagtcga

SEQ ID NO: 69453 - DNA, 21 bp, Homo sapiens
  source 1..21: mol_type = genomic DNA
gccgaaatagctcagttggga

SEQ ID NO: 69454 - DNA, 19 bp, Homo sapiens
  source 1..19: mol_type = genomic DNA
gccgagatagctcagttgg

SEQ ID NO: 69455 - DNA, 17 bp, Homo sapiens
  source 1..17: mol_type = genomic DNA
gcgagaggtagcgggat

SEQ ID NO: 69456 - DNA, 23 bp, Homo sapiens
  source 1..23: mol_type = genomic DNA
gctcagtcggtagagcatcagac

SEQ ID NO: 69457 - DNA, 21 bp, Homo sapiens
  source 1..21: mol_type = genomic DNA
gcttacgaccccttatttacc

SEQ ID NO: 69458 - DNA, 20 bp, Homo sapiens
  source 1..20: mol_type = genomic DNA
ggctccgtggcgcaatggat

SEQ ID NO: 69459 - DNA, 18 bp, Homo sapiens
  source 1..18: mol_type = genomic DNA
gggggtatagctcagcgg

SEQ ID NO: 69460 - DNA, 22 bp, Homo sapiens
  source 1..22: mol_type = genomic DNA
ggtggagttaaagactttttct

SEQ ID NO: 69461 - DNA, 20 bp, Homo sapiens
  source 1..20: mol_type = genomic DNA
ggtggtctagtggttaggat

SEQ ID NO: 69462 - DNA, 16 bp, Homo sapiens
  source 1..16: mol_type = genomic DNA
ggttagcgcgcggtac

SEQ ID NO: 69463 - DNA, 20 bp, Homo sapiens
  source 1..20: mol_type = genomic DNA
ggttagtactctgcgttgtg

SEQ ID NO: 69464 - DNA, 20 bp, Homo sapiens
  source 1..20: mol_type = genomic DNA
ggttccatagtgtagcggtt

SEQ ID NO: 69465 - DNA, 19 bp, Homo sapiens
  source 1..19: mol_type = genomic DNA
gtctctgtggtgcaatcgg

SEQ ID NO: 69466 - DNA, 19 bp, Homo sapiens
  source 1..19: mol_type = genomic DNA
gttagtactctgcgttgtg

SEQ ID NO: 69467 - DNA, 19 bp, Homo sapiens
  source 1..19: mol_type = genomic DNA
gttcaaatctcgctggggc

SEQ ID NO: 69468 - DNA, 20 bp, Homo sapiens
  source 1..20: mol_type = genomic DNA
gttcgaatccgagtcacggc

SEQ ID NO: 69469 - DNA, 23 bp, Homo sapiens
  source 1..23: mol_type = genomic DNA
taaacaaaacgaatgatttcgac

SEQ ID NO: 69470 - DNA, 24 bp, Homo sapiens
  source 1..24: mol_type = genomic DNA
taaacaaaacgaatgatttcgact

SEQ ID NO: 69471 - DNA, 24 bp, Homo sapiens
  source 1..24: mol_type = genomic DNA
taaccaaaacatcagattgtgaat

SEQ ID NO: 69472 - DNA, 20 bp, Homo sapiens
  source 1..20: mol_type = genomic DNA
taactaagtgtttgtgggtt

SEQ ID NO: 69473 - DNA, 20 bp, Homo sapiens
  source 1..20: mol_type = genomic DNA
taactcatgcccccatgtct

SEQ ID NO: 69474 - DNA, 16 bp, Homo sapiens
  source 1..16: mol_type = genomic DNA
taagtgtttgtgggtt

SEQ ID NO: 69475 - DNA, 21 bp, Homo sapiens
  source 1..21: mol_type = genomic DNA
taatggtggagttaaagactt

SEQ ID NO: 69476 - DNA, 22 bp, Homo sapiens
  source 1..22: mol_type = genomic DNA
tacctcctcaaagcaatacact

SEQ ID NO: 69477 - DNA, 21 bp, Homo sapiens
  source 1..21: mol_type = genomic DNA
tagcactctggactctgaatc

SEQ ID NO: 69478 - DNA, 24 bp, Homo sapiens
  source 1..24: mol_type = genomic DNA
taggagatttcaacttaacttgac

SEQ ID NO: 69479 - DNA, 20 bp, Homo sapiens
  source 1..20: mol_type = genomic DNA
tatccattggtcttaggccc

SEQ ID NO: 69480 - DNA, 22 bp, Homo sapiens
  source 1..22: mol_type = genomic DNA
tatccattggtcttaggcccca

SEQ ID NO: 69481 - DNA, 22 bp, Homo sapiens
  source 1..22: mol_type = genomic DNA
tcaaatcccggacgagccccca

SEQ ID NO: 69482 - DNA, 21 bp, Homo sapiens
  source 1..21: mol_type = genomic DNA
tcacaagaactgctaactcat

SEQ ID NO: 69483 - DNA, 18 bp, Homo sapiens
  source 1..18: mol_type = genomic DNA
tccagtggcgcaatcggt

SEQ ID NO: 69484 - DNA, 17 bp, Homo sapiens
  source 1..17: mol_type = genomic DNA
tcccattggtctagcca

SEQ ID NO: 69485 - DNA, 20 bp, Homo sapiens
  source 1..20: mol_type = genomic DNA
tccggatggaggcgtgggtt

SEQ ID NO: 69486 - DNA, 22 bp, Homo sapiens
  source 1..22: mol_type = genomic DNA
tcgagccccagtggaaccacca

SEQ ID NO: 69487 - DNA, 18 bp, Homo sapiens
  source 1..18: mol_type = genomic DNA
tcggttagcgcgcggtac

SEQ ID NO: 69488 - DNA, 23 bp, Homo sapiens
  source 1..23: mol_type = genomic DNA
tcgtggttgtagtccgtgcgaga

SEQ ID NO: 69489 - DNA, 23 bp, Homo sapiens
  source 1..23: mol_type = genomic DNA
tgacaacagaggcttacgacccc

SEQ ID NO: 69490 - DNA, 22 bp, Homo sapiens
  source 1..22: mol_type = genomic DNA
tgattctcgcttcgggtgtgag

SEQ ID NO: 69491 - DNA, 21 bp, Homo sapiens
  source 1..21: mol_type = genomic DNA
tgattctcggtttgggtccga

SEQ ID NO: 69492 - DNA, 20 bp, Homo sapiens
  source 1..20: mol_type = genomic DNA
tgatttgcgttcagttgatg

SEQ ID NO: 69493 - DNA, 21 bp, Homo sapiens
  source 1..21: mol_type = genomic DNA
tgatttgcgttcagttgatgc

SEQ ID NO: 69494 - DNA, 23 bp, Homo sapiens
  source 1..23: mol_type = genomic DNA
tgctaatccattgtgctttgcac

SEQ ID NO: 69495 - DNA, 18 bp, Homo sapiens
  source 1..18: mol_type = genomic DNA
tgctaatggtggagttaa

SEQ ID NO: 69496 - DNA, 21 bp, Homo sapiens
  source 1..21: mol_type = genomic DNA
tggattcatatccgcgtgggt

SEQ ID NO: 69497 - DNA, 20 bp, Homo sapiens
  source 1..20: mol_type = genomic DNA
tggggtctccccgcgcaggt

SEQ ID NO: 69498 - DNA, 19 bp, Homo sapiens
  source 1..19: mol_type = genomic DNA
tggggtgtgataggtggca

SEQ ID NO: 69499 - DNA, 21 bp, Homo sapiens
  source 1..21: mol_type = genomic DNA
tggtggagttaaagacttttt

SEQ ID NO: 69500 - DNA, 24 bp, Homo sapiens
  source 1..24: mol_type = genomic DNA
tggttagtactctgcgttgtggcc

SEQ ID NO: 69501 - DNA, 25 bp, Homo sapiens
  source 1..25: mol_type = genomic DNA
tgtttagacgggctcacatcacccc

SEQ ID NO: 69502 - DNA, 25 bp, Homo sapiens
  source 1..25: mol_type = genomic DNA
ttaaattataggctaaatcctatat

SEQ ID NO: 69503 - DNA, 21 bp, Homo sapiens
  source 1..21: mol_type = genomic DNA
ttaagttaaagattaagagaa

SEQ ID NO: 69504 - DNA, 25 bp, Homo sapiens
  source 1..25: mol_type = genomic DNA
ttagaatcttagctttgggtgctaa

SEQ ID NO: 69505 - DNA, 24 bp, Homo sapiens
  source 1..24: mol_type = genomic DNA
ttagacgggctcacatcaccccat

SEQ ID NO: 69506 - DNA, 21 bp, Homo sapiens
  source 1..21: mol_type = genomic DNA
ttcataactttgtcaaagtta

SEQ ID NO: 69507 - DNA, 17 bp, Homo sapiens
  source 1..17: mol_type = genomic DNA
ttcatatccgcgtgggt

SEQ ID NO: 69508 - DNA, 21 bp, Homo sapiens
  source 1..21: mol_type = genomic DNA
ttcgagcccacccagggacgc

SEQ ID NO: 69509 - DNA, 19 bp, Homo sapiens
  source 1..19: mol_type = genomic DNA
ttcgagccccacgttgggc

SEQ ID NO: 69510 - DNA, 22 bp, Homo sapiens
  source 1..22: mol_type = genomic DNA
tttaaccaaaacatcagattgt

SEQ ID NO: 69511 - DNA, 23 bp, Homo sapiens
  source 1..23: mol_type = genomic DNA
tttagacgggctcacatcacccc

SEQ ID NO: 69512 - DNA, 16 bp, Homo sapiens
  source 1..16: mol_type = genomic DNA
tttcgactcattaaat
